(19) United States
(12) Patent Application Publication
(10) Pub. No.: US 2019/0016775 A1
(43) Pub. Date: Jan. 17, 2019

(54) Immunogenic Compositions

(71) Applicant: Pfizer Inc., New York, NY (US)

(72) Inventors: Joseph John Binder, San Diego, CA (US); Helen Kim Cho, San Diego, CA (US); Paul Jason Cockle, San Anselmo, CA (US); Derek John Falconer, San Diego, CA (US); Siradanahalli Guru, San Diego, CA (US); Marianne Marcela Andrea Martinic, Bottmingen (CH)

(21) Appl. No.: 16/029,878

(22) Filed: Jul. 9, 2018

Related U.S. Application Data
(60) Provisional application No. 62/531,227, filed on Jul. 11, 2017.
(60) Provisional application No. 62/682,044, filed on Jun. 7, 2018.

(51) Int. Cl. C07K 14/705; C12N 9/12

(52) U.S. Cl. CPC C07K 14/705; A61K 38/00; C12Y 207/07049; C12N 9/1276

(57) ABSTRACT

The present disclosure provides: (a) isolated immunogenic CEA polypeptides; (b) isolated nucleic acid molecules encoding (i) an immunogenic CEA polypeptide, (ii) an immunogenic CEA polypeptide and an immunogenic MUC1 polypeptide, (iii) an immunogenic CEA polypeptide and an immunogenic TERT polypeptide, or (iv) an immunogenic CEA polypeptide, an immunogenic MUC1 polypeptide, and an immunogenic TERT polypeptide; (c) compositions comprising an isolated nucleic acid molecule; and (d) methods relating to uses of the immunogenic CEA polypeptides, nucleic acid molecules, and compositions.

### REFERENCE TO RELATED APPLICATIONS

[0001] This application claims the benefit of U.S. Provisional Application No. 62/531,227 filed on Jul. 11, 2017 and U.S. Provisional Application No. 62/682,044 filed on Jun. 7, 2018. The entire content of each of the forgoing applications is incorporated herein by reference.

### REFERENCE TO SEQUENCE LISTING

[0002] This application is being filed along with a sequence listing in electronic format. The sequence listing is provided as a file in .txt format entitled “PC72354A_FF_SeqList_ST25.txt”, created on Jul. 3, 2018, and having a size of 963 KB. The sequence listing contained in the .txt file is part of the specification and is herein incorporated by reference in its entity.

### FIELD OF THE INVENTION

[0003] The present invention relates generally to immunotherapy and specifically to vaccines and methods for treating or preventing neoplastic disorders.

### BACKGROUND OF THE INVENTION

[0004] Cancers are a leading cause of mortality worldwide. They may occur in a variety of organs and tissues, such as pancreas, breasts, lungs, stomach, colon, and rectum. Pancreatic cancers are the fourth most common cause of cancer deaths in the United States. Pancreatic cancers may occur in the exocrine or endocrine component of the pancreas. Exocrine cancers include (1) pancreatic adenocarcinoma, which is by far the most common type, (2) acinar cell carcinoma, which represents 5% of exocrine pancreatic cancers, (3) cystadenocarcinomas, which account for 1% of pancreatic cancers, and (4) other rare forms of cancers, such as pancreatoblastoma, adenosquamous carcinomas, signet ring cell carcinomas, hepatoid carcinomas, colloid carcinomas, undifferentiated carcinomas, and undifferentiated carcinomas with osteoclast-like giant cells.

[0005] Breast cancer (BrC) is another common cancer among American women and the second leading cause of cancer death in women. Based on various tumor markers such as estrogen receptor (ER), progesterone receptor (PR), and human epidermal growth factor receptor 2 (HER2), breast cancers can be classified into major subtypes, such as (1) hormone receptor-positive cancers (where the cancer cells contain either estrogen receptors or progesterone receptors); (2) hormone receptor-negative cancers (where the cancer cells don't have either estrogen receptors or progesterone receptors); (3) HER2/neu positive (wherein cancers that have excessive HER2/neu protein or extra copies of the HER2/neu gene); (4) HER2/neu negative cancers (where the cancers don't have excess HER2/neu); (5) triple-negative cancers (wherein the breast cancer cells have neither estrogen receptors, nor progesterone receptors, nor excessive HER2); and (6) triple-positive cancers (where the cancers are estrogen receptor-positive, progesterone receptor-positive, and have too much HER2).

[0006] Lung cancer accounts for more than a quarter of all cancer deaths and is the leading cause of cancer-related mortality worldwide. Approximately 85% of cases are histologically classified as non-small cell lung cancers (NSCLC). NSCLC may be further classified into several subtypes, such as squamous cell (epidermoid) carcinoma, adenocarcinoma, large cell (undifferentiated) carcinoma, adenosquamous carcinoma, and sarcomatoid carcinoma. The second common type of lung cancer is small cell lung cancer (SCLC), which accounts for about 10% to 15% of all lung cancers.

[0007] Gastric cancer (GaC) is the third most common cause of cancer-related death in the world. About 90-95% of gastric cancers are adenocarcinomas; other less common types include lymphoma, GISTs, and carcinoid tumors.

[0008] Colorectal cancer (CRC) is also a leading cause of cancer-related deaths in the United States. Adenocarcinomas are the most common type of CRC, which accounts for more than 95% of colorectal cancers. Other less common types of CRC include Carcinoid tumors, gastrointestinal stromal tumors (GISTs), lymphomas, and sarcomas.

[0009] Traditional regimens of cancer management have been successful in the management of a selective group of circulating and solid cancers. However, many types of cancers are resistant to traditional approaches. In recent years, immunotherapy for cancers has been explored, particularly cancer vaccines and antibody therapies. One approach of cancer immunotherapy involves the administering an immunogen to generate an active systemic immune response towards a tumor-associated antigen (TAA) on the target cancer cell. While a large number of tumor-associated antigens have been identified and many of these antigens have been explored as viral-, bacterial-, protein-, peptide-, or DNA-based vaccines for the treatment or prevention of cancers, most clinical trials so far have failed to produce a therapeutic product. Therefore, there exists a need for an immunogen or vaccine that may be used in the treatment or prevention of cancers.

[0010] The present disclosure relates to immunogenic polypeptides derived from the tumor-associated antigens MUC1, CEA, or TERT, nucleic acid molecules encoding such immunogenic polypeptides, compositions comprising such an immunogenic polypeptide or nucleic acid molecule, such as vaccines, and uses of the polypeptides, nucleic acid molecules, and compositions.

[0011] The human mucin 1 protein (MUC1; also known as episialin, PEM, H23Ag, EMA, CA15-3, and MCA) is a polymorphic transmembrane glycoprotein expressed on the apical surfaces of simple and glandular epithelia. The MUC1 gene encodes a single polypeptide chain precursor that includes a signal peptide sequence. Immediately after translation the signal peptide sequence is removed and the remaining portion of the MUC1 precursor is further cleaved into two peptide fragments: the longer N-terminal subunit (MUC1-N or MUC1α) and the shorter C-terminal subunit (MUC1-C or MUC1β). The mature MUC1 comprises a MUC1-N and a MUC1-C associated through stable hydrogen bonds. MUC1-N, which is an extracellular domain, contains variable number tandem repeats (VNTR) of 20 amino acid residues, with the number of repeats varying from 20 to 125 in different individuals. The region of the MUC1 protein that is composed of the variable number tandem repeats is also referred to in the present disclosure as “VNTR region.” MUC1-C contains a short extracellular region (approximately 53 amino acids), a transmembrane domain (approximately 28 amino acid), and a cytoplasmic tail (approximately 72 amino acids). The cytoplasmic tail of MUC1 (MUC1-CT) contains highly conserved serine and tyrosine residues that are phosphorylated by growth factor receptors and intracellular kinases. Human MUC1 exists in multiple isoforms resulting from different types of MUC1 RNA alternative splicing. The amino acid sequence of full length human MUC1 isoform 1 protein precursor (isoform 1, Uniprot P15941-1) is provided in SEQ ID NO: 1 (“MUC1 Reference Polypeptide”). At least 16 other isoforms of human MUC-1 have been reported so far (Uniprot P15941-2 through P15941-17), which include various insertions, deletions, or substitutions as compared to the sequence of isoform 1. These isoforms are known as isoform 2, 3, 4, 5, 6, Y, 8, 9, F, Y-LSP, S2, M6, ZD, T10, E2, and J13 (Uniprot P15941-2 through P15941-17, respectively). The full length human MUC1 isoform 1 precursor protein consists of 1255 amino acids, which includes a signal peptide sequence at amino acids 1-23. The MUC1-N and MUC1-C domains of the mature MUC1 protein consist of amino acids 24-1097 and 1098-1255, respectively.

[0012] Carcinoembryonic antigen-related cell adhesion molecules (also known as CEACAMs) are a group of glycoproteins in the immunoglobulin (Ig) superfamily group. Structurally, the CEACAM group consists of a single N-terminal domain and a maximum of six disulfide-linked internal domains similar to C2-type Ig domains. The group contains 12 proteins (CEACAM1, 3-8, 16, 18-21), several of which, such as CEACAM1, CEACAM5, and CEACAM6, have been considered valid clinical markers and promising therapeutic targets in various cancers such as melanoma, lung, colorectal, and pancreatic cancers. Overexpression of CEACAM5, also referred to herein and known in the art as CEA, has been found to be in the majority of human carcinomas. CEACAM5 is expressed as a 702-amino acid precursor protein consisting of: (1) a signal peptide (amino acids 1-34); (2) the N-domain (amino acids 35-144); (3) three repeating units comprising six constant C2-like domains termed as A1 (amino acids 146-237), B1 (amino acids 238-322), A2 (amino acids 324-415), and B2 (amino acids 416-498), A3 (amino acids 502-593), and B3 (amino acids 594-677); and (4) a propeptide (amino acids 686-702). The signal peptide is cleaved off from the mature protein during transport to the cell surface. The amino acid sequence of a full length human CEA precursor protein is available at UniProt (Accession No. P06731) and is also set forth herein in SEQ ID NO:2 (“CEA Reference Polypeptide”).

[0013] Telomerase reverse transcriptase (or TERT) is the catalytic component of the telomerase, which is a ribonucleoprotein polymerase responsible for maintaining telomere ends by addition of the telomere repeat TTAGGG. In addition to TERT, telomerase also includes an RNA component which serves as a template for the telomere repeat. Human TERT gene encodes an 1132 amino acid protein. Several isoforms of human TERT exist, which result from alternative splicing. The amino acid sequences of isoform 1, isoform 2, isoform 3, and isoform 4 are available at Uniprot (<www.uniprot.org>; Uniprot identifiers O14746-1, O14746-2, O14746-3, and O14746-4, respectively). The amino acid sequence of human full length TERT isoform 1 protein (isoform 1, Genbank AAD30037, Uniprot O14746-1) is also provided herein in SEQ ID NO:3 (“TERT Reference Polypeptide”). As compared with TERT isoform 1 (O14746-1), isoform 2 (O14746-2) has replacement of amino acids 764-807 (STLTDLQPYM . . . LNEASSGLFD→LRPVPGDPAG . . . AGRAAPAFGG) and deletion of C-terminal amino acids 808-1132), isoform 3 (O14746-3) has deletion of amino acids 885-947, and isoform 4 (O14746-4) has deletions of amino acids 711-722 and 808-1132, and replacement of amino acids 764-807 (STLTDLQPYM . . . LNEASSGLFD→LRPVPGDPAG . . . AGRAAPAFGG).

### SUMMARY OF THE INVENTION

[0014] In some aspects, the present disclosure provides isolated immunogenic polypeptides derived from tumor-associated antigen (TAA) MUC1, CEA, or TERT, which is useful, for example, in eliciting an immune response in vivo (e.g. in an animal, including humans), or for use as a component in pharmaceutical compositions, including vaccines, for the treatment of cancer.

[0015] In other aspects, the present disclosure provides nucleic acid molecules (also referred to as “antigen constructs”) that each encode one or more immunogenic polypeptides provided by the present disclosure. In some embodiments, the present disclosure provides multi-antigen nucleic acid constructs that each encode two, three, or more different immunogenic TAA polypeptides, such as: (1) one immunogenic CEA polypeptide and one immunogenic MUC1 polypeptide; (2) one immunogenic CEA polypeptide and one immunogenic TERT polypeptide; and (3) one immunogenic CEA polypeptide, one immunogenic MUC1 polypeptide, and one immunogenic TERTpolypeptide.

[0016] The disclosure also provides vectors (such as plasmid vectors and virual vectors) that contain one or more antigen constructs provided by the present disclosure. The vectors are useful for cloning or expressing the encoded immunogenic TAA polypeptides, or for delivering the antigen constructs in a composition, such as a vaccine, to a host cell or to a host animal or a human.

[0017] The present disclosure further provides compositions comprising one or more of the immunogenic polypeptides, isolated antigen constructs encoding one or more immunogenic TAA polypeptides, or vectors containing an antigen construct encoding one or more immunogenic TAA polypeptides. In some embodiments, the composition is an immunogenic composition useful for eliciting an immune response against a TAA in a mammal, such as a mouse, dog, monkey, or human. In some embodiments, the composition is a vaccine composition useful for immunization of a mammal, such as a human, for inhibiting abnormal cell proliferation, for providing protection against the development of cancer (used as a prophylactic), or for treatment of disorders (used as a therapeutic) associated with TAA over-expression, such as cancer, particularly pancreatic, ovarian, lung, colorectal, gastric, and breast cancer.

[0018] In some further aspects, the present disclosure provides a method of eliciting an immune response against tumor-associated antigen (TAA) CEA, MUC1, or TERT, which comprises administering to the mammal an effective amount of (1) an immunogenic CEA polypeptide, an immunogenic MUC1 polypeptide, and/or an immunogenic TERT polypeptide, (2) an antigen construct encoding one or more immunogenic TAA polypeptides provided by the present disclosure, (3) vectors (such as viral vectors and plasmid vectors) that contain one or more antigen constructs, or (4) compositions containing one or more immunogenic TAA polypeptides, one or more antigen constructs, or one or more vectors as disclosed herein. Examples of the mammals in each of htemehtods include mouse, dog, monkey, or human.

[0019] In some further aspects, the present disclosure provides a method of inhibiting abnormal cell proliferation, a method of providing protection against the development of cancer, a method for treatment of cancer, and a method for treatment of a disorder associated with over-expression of a TAA in a mammal, each of which comprises administering to the mammal an effective amount of (1) an immunogenic CEA polypeptide, an immunogenic MUC1 polypeptide, an immunogenic TERT polypeptide, or a combination of any of these immunogenic polypeptides, (2) an antigen construct encoding one or more of these immunogenic TAA polypeptides, (3) vectors (such as viral vectors and plasmid vectors) that contain one or more antigen constructs, or (4) compositions containing one or more of these immunogenic TAA polypeptides, one or more antigen constructs, or one or more vectors as disclosed herein. Examples of the mammals in each of htemehtods include mouse, dog, monkey, or human. In the methods related to cancer management, examples of cancers include pancreatic, ovarian, lung, colorectal, gastric, or breast cancer.

[0020] In an aspect of the present invention, the following embodiments, each described by a numbered clause, are contemplated:

[0021] 1. An antigen construct, comprising a nucleotide sequence encoding an immunogenic CEA polypeptide as disclosed herein.

[0022] 2. The antigen construct according to clause 1, further comprising a nucleotide sequence encoding an immunogenic MUC1 polypeptide as disclosed herein.

[0023] 3. The antigen construct according to clause 1 or 2, further comprising a nucleotide sequence encoding an immunogenic TERT polypeptide as disclosed herein.

[0024] 4. The antigen construct according to clause 1, further comprising a nucleotide sequence encoding an immunogenic MUC1 polypeptide as disclosed herein and a nucleotide sequence encoding an immunogenic TERT polypeptide as disclosed herein.

[0025] 5. The antigen construct according to any one of clauses 2, 3, or 4, further comprising a spacer nucleotide sequence as disclosed herein.

[0026] 6. The antigen construct according to clause 5, wherein the spacer nucleotide sequence encodes a 2A peptide.

[0027] 7. The antigen construct according to clause 5, wherein the spacer nucleotide sequence encodes a 2A peptide selected from the group consisting of EMC2A, ERA2A, ERB2A, and T2A.

[0028] 8. The antigen construct according to any one of clauses 1-7, wherein the immunogenic CEA polypeptide is selected from the group consisting of:

[0029] (1) a polypeptide comprising or consisting of amino acids 2-702 of SEQ ID NO:2, amino acids 323-702 of SEQ ID NO:2, or amino acids 323-677 of SEQ ID NO:2;

[0030] (2) a polypeptide comprising or consisting of amino acid sequence of SEQ ID NO:15 or amino acids 4-704 of SEQ ID NO:15;

[0031] (3) a polypeptide comprising or consisting of the amino acid sequence of SEQ ID NO:17 or amino acids 4-526 of SEQ ID NO:17;

[0032] (4) a polypeptide comprising or consisting of the sequence of SEQ ID NO:19 or amino acids 4-468 of SEQ ID NO:19; or

[0033] (5) a polypeptide that is a functional variant of any of the polypeptides of (1)-(4) above.

[0034] 9. The antigen construct according to any one of clauses 3-8, wherein the immunogenic TERT polypeptide is selected from the group consisting of:

[0035] (1) a polypeptide comprising the amino acid sequence of SEQ ID NO:9 or amino acids 2-893 of SEQ ID NO:9;

[0036] (2) a polypeptide comprising the amino acid sequence of SEQ ID NO:11 or amino acids 3-791 of SEQ ID NO:11;

[0037] (3) a polypeptide comprising the amino acid sequence of SEQ ID NO:13 or amino acids 4-594 of SEQ ID NO:13; and

[0038] (4) a polypeptide that is a functional variant of any of the polypeptides of (1)-(3) above.

[0039] 10. The antigen construct according to any one of clauses 2, and 4-9, wherein the immunogenic MUC1 polypeptide is selected from the group consisting of:

[0040] (1) a polypeptide comprising the amino acid sequence of SEQ ID NO:5 or amino acids 4-537 of SEQ ID NO:5;

[0041] (2) a polypeptide comprising the amino acid sequence of SEQ ID NO:7 or amino acids 4-517 of SEQ ID NO:7; and

[0042] (3) a functional variant of the polypeptide of (1) or (2) above.

[0043] 11. The antigen construct according to any one of clauses 1-10, which comprises a nucleotide sequence encoding an amino acid sequence selected from the group consisting of:

[0044] (1) the amino acid sequence of SEQ ID NO:31 or an amino acid sequence comprising amino acids 4-1088 of SEQ ID NO:31;

[0045] (2) the amino acid sequence of SEQ ID NO:33 or an amino acid sequence comprising amino acids 4-1081 of SEQ ID NO:33;

[0046] (3) the amino acid sequence of SEQ ID NO:35 or an amino acid sequence comprising amino acids 4-1085 of SEQ ID NO:35;

[0047] (4) the amino acid sequence of SEQ ID NO:37 or an amino acid sequence comprising an amino acid sequence comprising amino acids 4-1030 of SEQ ID NO:37;

[0048] (5) the amino acid sequence of SEQ ID NO:39 or an amino acid sequence comprising amino acids 4-1381 of SEQ ID NO:39; and

[0049] (6) the amino acid sequence of SEQ ID NO:41 or an amino acid sequence comprising amino acids 4-1441 of SEQ ID NO:41.

[0050] 12. The antigen construct according to any one of clauses 1-11, which comprises a nucleotide sequence selected from the group consisting of:

[0051] (1) the nucleotide sequence of SEQ ID NO:30 or a nucleotide sequence comprising nucleotides 10-3264 of SEQ ID NO:30;

[0052] (2) the nucleotide sequence of SEQ ID NO:32 or a nucleotide sequence comprising nucleotides 10-3243 of SEQ ID NO:32;

[0053] (3) the nucleotide sequence of SEQ ID NO:34 or a nucleotide sequence comprising nucleotides 10-3255 of SEQ ID NO:34;

[0054] (4) the nucleotide sequence of SEQ ID NO:36 or a nucleotide sequence comprising nucleotides 10-3090 of SEQ ID NO:36;

[0055] (5) the nucleotide sequence of SEQ ID NO:38 or a nucleotide sequence comprising nucleotides 10-4143 of SEQ ID NO:38;

[0056] (6) the nucleotide sequence of SEQ ID NO:40 or a nucleotide sequence comprising nucleotides 10-4323 of SEQ ID NO:40; and

[0057] (7) a nucleotide sequences that is a degenerate variant of any of the nucleotide sequences of (1)-(6) above.

[0058] 13. The antigen construct according to any one of clauses 1-12, which comprises a nucleotide sequence encoding an amino acid sequence selected from the group consisting of:

[0059] (1) the amino acid sequence of SEQ ID NO:43 or an amino acid sequence comprising amino acids 4-2003 of SEQ ID NO:43;

[0060] (2) the amino acid sequence of SEQ ID NO:45 or an amino acid sequence comprising amino acids 4-2001 of SEQ ID NO:45;

[0061] (3) the amino acid sequence of SEQ ID NO:47 or an amino acid sequence comprising amino acids 4-2008 of SEQ ID NO:47;

[0062] (4) the amino acid sequence of SEQ ID NO:49 or an amino acid sequence comprising amino acids 4-1996 of SEQ ID NO: 49;

[0063] (5) the amino acid sequence of SEQ ID NO:51 or an amino acid sequence comprising amino acids 4-1943 of SEQ ID NO:51; and

[0064] (6) the amino acid sequence of SEQ ID NO:53 or an amino acid sequence comprising amino acids 4-1943 of SEQ ID NO:53.

[0065] 14. The antigen construct according to any one of clauses 1-13, which comprises a nucleotide sequence selected from the group consisting of:

[0066] (1) the nucleotide sequence of SEQ ID NO:42 or a nucleotide sequence comprising nucleotides 10-6009 of SEQ ID NO:42;

[0067] (2) the nucleotide sequence of SEQ ID NO:44 or a nucleotide sequence comprising nucleotides 10-6003 of SEQ ID NO:44;

[0068] (3) the nucleotide sequence of SEQ ID NO:46 or a nucleotide sequence comprising nucleotides 10-6024 of SEQ ID NO:46;

[0069] (4) the nucleotide sequence of SEQ ID NO:48 or a nucleotide sequence comprising nucleotides 10-5988 of SEQ ID NO:48;

[0070] (5) the nucleotide sequence of SEQ ID NO:50 or a nucleotide sequence comprising nucleotides 10-5829 of SEQ ID NO:50;

[0071] (6) the nucleotide sequence of SEQ ID NO:52 or a nucleotide sequence comprising nucleotides 10-5829 of SEQ ID NO:52; and

[0072] (7) a nucleotide sequence that is a degenerate variant of any of the nucleotide sequences of (1)-(6) above.

[0073] 15. The antigen construct according to any one of clauses 1-14, which comprises:

[0074] (1) a nucleotide sequence of any of SEQ ID NOS: 87, 88, 89, 90, 91, and 92; or

[0075] (2) a degenerate variant of a nucleotide sequence of any of SEQ ID NOS: 87, 88, 89, 90, 91, and 92.

[0076] 16. A pharmaceutical composition comprising: (i) an antigen construct according to any one of clauses 1-15 and (ii) a pharmaceutically acceptable carrier.

[0077] 17. The pharmaceutical composition according to clause 16, which is a vaccine.

[0078] 18. A method of treating cancer in a human in need of treatment, comprising administering to the human an effective amount of the pharmaceutical composition according to clause 16 or clause 17.

[0079] 19. The method according to clause 18, wherein the cancer over-expresses one or more tumor-associated antigens selected from MUC1, CEA, or TERT.

[0080] 20. The method according to clause 18, wherein the cancer is pancreatic cancer, ovarian cancer, breast cancer, gastric cancer, lung cancer, or colorectal cancer.

[0081] 21. The method according to clause 18, wherein the cancer is triple negative breast cancer, estrogen receptor positive breast cancer, or HER2 positive breast cancer.

[0082] 22. The method according to clause 18, further comprising administering to the patient an effective amount of an immune modulator.

[0083] 23. The method according to clause 22, wherein the immune modulator is a CTLA-4 inhibitor, an 001 inhibitor, a PD-1 inhibitor, or a PD-L1 inhibitor.

[0084] 24. The method according to clause 18, further comprising administering to the human an adjuvant.

[0085] 25. A vector, comprising an antigen construct according to any one of clauses 1-15.

[0086] 26. The vector according to clause 25, which is a plasmid vector.

[0087] 27. The vector according to clause 26, which comprises a nucleotide sequence of any of SEQ ID NOs:57, 59, 61, 63, 65, 67, 69, 70, 71, 72, 73, and 74.

[0088] 28. The vector according to clause 25, which is a viral vector.

[0089] 29. The vector according to clause 28, which comprises a nucleotide sequence of any of SEQ ID NOs:58, 60, 62, 64, 66, and 68.

[0090] 30. A method for the treatment of cancer in a human, comprising administering to the human an effective amount of (1) an antigen construct according to any one of clauses 1-15, (2) a pharmaceutical composition according to clause 16 or clause 17, or (3) a vector according to any one of clauses 25-29.

### BRIEF DESCRIPTION OF DRAWINGS

[0091] FIG. 1. Diagram depicting the organization of AdC68 vectors carrying a triple-antigen construct (i.e., referred to as vectors AdC68Y-1424, AdC68Y-1425, AdC68Y-1426, AdC68Y-1427, AdC68Y-1428, and AdC68Y-1429). The E1 and E3 deleted AdC68 vector backbone was designed from Genbank reference sequence AC_000011.1. Transgene open reading frames were inserted into the E1 region, between the CMV immediate early enhancer/promoter and SV40 poly A terminator. A tet operator sequence was inserted after the promoter.

### DETAILED DESCRIPTION OF THE INVENTION

### A. Definitions

[0092] The term “adjuvant” refers to a substance that, when administered to a host mammal, such as human, is capable of enhancing, accelerating, or prolonging an antigen-specific immune response elicited by a vaccine or an immunogen in the host.

[0093] The term “agonist” refers to a substance which promotes (induces, causes, enhances or increases) the activity of another molecule (such as a receptor). The term agonist encompasses substances which bind a receptor and substances which promote receptor function without binding thereto.

[0094] The term “antagonist” or “inhibitor” refers to a substance that partially or fully blocks, inhibits, or neutralizes a biological activity of another molecule or a receptor.

[0095] The term “antigen” refers to a substance that, when introduced to a host mammal (directly or upon expression as in, e.g., DNA vaccines), is capable of being recognized by the immune system of the host mammal, such as binding to an antibody or to antigen receptors on T cells. Antigens can be proteins or protein fragments, carbohydrates, gangliosides, haptens, or nucleic acids. A substance is termed “antigenic” when it is capable of specifically interacting with an antigen recognition molecule of the immune system, such as antibody or T cell antigen receptor. The term “tumor-associated antigen” or “TAA” refers to an antigen which is specifically expressed by tumor cells or expressed at a higher frequency or density by tumor cells than by non-tumor cells of the same tissue type. TAA may be molecules that are not normally expressed by the host, or mutated, truncated, misfolded, or otherwise abnormal manifestations of molecules normally expressed by the host. Examples of TAA include CEA, TERT, and MUC1.

[0096] The term “co-administration” refers to administration of two or more agents to the same subject as part of a treatment regimen. The two or more agents may be encompassed in a single formulation and thus be administered simultaneously. Alternatively, the two or more agents may be in separate physical formulations and administered separately, either sequentially or simultaneously to the subject. The term “administered simultaneously” or “simultaneous administration” means that the administration of the first agent and that of a second agent overlap in time with each other, while the term “administered sequentially” or “sequential administration” means that the administration of the first agent and that of a second agent do not overlap in time with each other.

[0097] The term “cytosolic” or “cytoplasmic” means that after a nucleotide sequence encoding a particular polypeptide is expressed by a host cell, the expressed polypeptide is expected to be retained inside the host cell.

[0098] The term “degenerate variants” refers to nucleic acid sequences that have substitutions of bases but encode the same polypeptide or amino acid sequence.

[0099] The term “effective amount” refers to an amount administered to a mammal that is sufficient to cause a desired effect in the mammal.

[0100] The term “functional variant” of an amino acid sequence or an immunogenic TAA polypeptide (collectively “reference polypeptide”) refers to an amino acid sequence or a polypeptide that comprises from 90% to 100% of the number of amino acids of the reference polypeptide, has lower than 100% but higher than 95% identity to the amino acid sequence of the reference polypeptide, and possess the same or similar immunogenic properties of the reference polypeptide.

[0101] The term “identical” refers to two or more nucleic acids, or two or more polypeptides, that share the exact same sequence of nucleotides or amino acids, respectively. The term “percent identity” describes the level of similarity between two or more nucleic acids or polypeptides. When two sequences are aligned by bioinformatics software, “percent identity” is calculated by multiplying the number of exact nucleotide/amino acid matches between the sequences by 100, and dividing by the length of the aligned region, including gaps. For example, two 100-amino acid long polypeptides that exhibit 10 mismatches when aligned would be 90% identical.

[0102] The term “immune-effector-cell enhancer” or “IEC enhancer” refers to a substance capable of increasing and/or enhancing the number, quality, and/or function of one or more types of immune effector cells of a mammal. Examples of immune effector cells include cytolytic Dendiritic cells, CD8 T cells, CD4 T cells, NK cells, and B cells.

[0103] The term “immune modulator” refers to a substance capable of altering (e.g., inhibiting, decreasing, increasing, enhancing or stimulating) the working or function of any component of the innate, humoral, or cellular immune system of a mammal. Thus, the term “immune modulator” encompasses the “immune-effector-cell enhancer” as defined herein and the “immune-suppressive-cell inhibitor” as defined herein, as well as substance that affects any other components of the immune system of a mammal.

[0104] The term “immune response” refers to any detectable response to a particular substance (such as an antigen or immunogen) by the adaptive immune system of a host mammal, including cell-mediated immune responses (e.g., responses mediated by T cells, such as antigen-specific T cells, and non-specific cells of the immune system) and humoral immune responses (e.g., responses mediated by B cells, such as generation and secretion of antibodies into the plasma, lymph, and/or tissue fluids). Examples of immune responses include an alteration (e.g., increase) in release of cytokines (e.g., Th1, Th2 or Th17 type cytokines) or chemokine, macrophage activation, dendritic cell activation, T cell (e.g., CD4+ or CD8+ T cell) activation, induction of B cell response (e.g., antibody production), induction of a cytotoxic T lymphocyte (“CTL”) response, and expansion (e.g., growth of a population of cells) of cells of the immune system (e.g., T cells and B cells).

[0105] The term “immunogenic” or “immunogenicity” refers to the ability of a substance upon administration to a host mammal (such as a human) to cause, elicit, stimulate, or induce an immune response, or to improve, enhance, increase or prolong a pre-existing immune response, in the host mammal, whether alone or when linked to a carrier, in the presence or absence of an adjuvant. Such a substance is referred to as “immunogen.”

[0106] The term “immunogenic composition” refers to a composition that is immunogenic.

[0107] The term “immunogenic MUC1 polypeptide” refers to a polypeptide that is immunogenic against a human native MUC1 protein or against cells expressing the human native MUC1 protein. The polypeptide may have the same amino acid sequence as that of a human native MUC1 protein or display one or more mutations as compared to the amino acid sequence of a human native MUC1 protein.

[0108] The term “immunogenic CEA polypeptide” refers to a polypeptide that is immunogenic against a human native CEA protein or against cells expressing a human native CEA protein and displays one or more mutations, such as deletion of one or more amino acids, as compared to the amino acid sequence of the human native CEA protein.

[0109] The term “immunogenic TERT polypeptide” refers to a polypeptide that is immunogenic against a human native TERT protein or against cells expressing a human native TERT protein. The polypeptide may have the same amino acid sequence as that of a human native TERT protein or displays one or more mutations as compared to the amino acid sequence of a human native TERT protein.

[0110] The term “immunogenic TAA polypeptide” refers to an “immunogenic CEA polypeptide,” an “immunogenic MUC1 polypeptide, or an “immunogenic TERT polypeptide,” each as defined herein above.

[0111] The term “immune-suppressive-cell inhibitor” or “ISC inhibitor” refers to a substance capable of reducing and/or suppressing the number and/or function of immune suppressive cells of a mammal. Examples of immune suppressive cells include regulatory T cells (“Tregs”), myeloid-derived suppressor cells, and tumor-associated macrophages.

[0112] The term “mammal” refers to any animal species of the Mammalia class. Examples of mammals include: humans; non-human primates such as monkeys; laboratory animals such as rats, mice, guinea pigs; domestic animals such as cats, dogs, rabbits, cattle, sheep, goats, horses, and pigs; and captive wild animals such as lions, tigers, elephants, and the like.

[0113] The term “membrane-bound” means that after a nucleotide sequence encoding a particular polypeptide is expressed by a host cell, the expressed polypeptide is bound to, attached to, or otherwise associated with, the membrane of the cell.

[0114] The term “neoplastic disorder” refers to a condition in which cells proliferate at an abnormally high and uncontrolled rate, the rate exceeding and uncoordinated with that of the surrounding normal tissues. It usually results in a solid lesion or lump known as “tumor.” This term encompasses benign and malignant neoplastic disorders. The term “malignant neoplastic disorder”, which is used interchangeably with the term “cancer” in the present disclosure, refers to a neoplastic disorder characterized by the ability of the tumor cells to spread to other locations in the body (known as “metastasis”). The term “benign neoplastic disorder” refers to a neoplastic disorder in which the tumor cells lack the ability to metastasize.

[0115] The term “mutation” refers to deletion, addition, or substitution of amino acid residues in the amino acid sequence of a protein or polypeptide as compared to the amino acid sequence of a reference protein or polypeptide.

[0116] The term “pharmaceutical composition” refers to a solid or liquid composition suitable for administration to a subject (e.g. a human patient) for eliciting a desired physiological, pharmacological, or therapeutic effect. In addition to containing one or more active ingredients, a pharmaceutical composition may contain one or more pharmaceutically acceptable excipients.

[0117] The term “pharmaceutically acceptable excipient” refers to a substance in pharmaceutical composition, such as a vaccine, other than the active ingredients (e.g., the antigen, antigen-coding nucleic acid, immune modulator, or adjuvant) that is compatible with the active ingredients and does not cause significant untoward effect in subjects to whom it is administered.

[0118] The term “excipient” as used in the context of a pharmaceutical composition refers to a substance that generally has no medicinal properties and is included in the composition for purpose of streamlining the manufacture of the drug product and/or facilitating stabilization, delivery, and absorption of the active drug substance. The term “pharmaceutically acceptable excipient” refers to an excipient in a pharmaceutical composition, such as a vaccine composition, that is compatible with the active ingredients (e.g., the antigen or immunogen, antigen-coding nucleic acid, immune modulator, or adjuvant) in the composition and does not cause significant untoward effects in subjects to whom it is administered.

[0119] The terms “peptide,” “polypeptide,” and “protein” are used interchangeably herein, and refer to a polymeric form of amino acids linked together by peptide bonds. They may be of any length and can include coded and non-coded amino acids, chemically, or biochemically modified, or derivatized amino acids.

[0120] The term “preventing” or “prevent” refers to (a) keeping a disorder from occurring, (b) delaying the onset of a disorder or onset of symptoms of a disorder, or (c) minimizing the incidence or effects of a disorder.

[0121] The term “secreted” in the context of a polypeptide means that after a nucleotide sequence encoding the polypeptide is expressed by a host cell, the expressed polypeptide is secreted outside of the host cell.

[0122] The term “suboptimal dose” when used to describe the amount of an immune modulator, such as a protein kinase inhibitor, refers to a dose of the immune modulator that is below the minimum amount required to produce the desired therapeutic effect for the disease being treated when the immune modulator is administered alone to a patient.

[0123] The term “treating,” “treatment,” or “treat” refers to abrogating a disorder, reducing the severity of a disorder, or reducing the severity or occurrence frequency of a symptom of a disorder.

[0124] The term “vaccine” refers to an immunogenic composition for administration to a mammal (such as a human) for eliciting a protective immune response against a particular antigen or antigens. The primary active ingredient of a vaccine is the immunogen(s). A vaccine that comprises an immunogenic polypeptide as immunogen is also referred to as “peptide vaccine.” A vaccine that does not contain an immunogenic polypeptide but rather contains a nucleic acid molecule that encodes an immunogenic polypeptide is referred to as a “DNA vaccine” or “RNA vaccine” (depending on the case it may be). Upon delivery of the DNA or RNA vaccine into host cells, the immunogenic polypeptide encoded by the nucleic acid molecule will be expressed by the host cells, producing a protective immune response. The nucleic acid molecule in a DNA or RNA vaccine may be in the form of naked nucleic acid, plasmid, or virus vector, or any other form suitable for delivering the nucleic acid.

[0125] The term “vector” refers to a nucleic acid molecule, or a modified microorganism, that is capable of transporting or transferring a foreign nucleic acid molecule into a host cell. The foreign nucleic acid molecule is referred to as “insert” or “transgene.” A vector generally consists of an insert and a larger sequence that serves as the backbone of the vector. Based on the structure or origin of vectors, major types of vectors include plasmid vectors, cosmid vectors, phage vectors (such as lambda phage), viral vectors (such as adenovirus vectors), artificial chromosomes, and bacterial vectors.

### B. Immunogenic TAA Polypeptides

[0126] In some aspects, the present disclosure provides isolated immunogenic TAA polypeptides, which are useful, for example, for eliciting an immune response in vivo (e.g. in an animal, including humans) or in vitro, activating effector T cells, or generating antibodies specific for the TAA or for use as a component in a pharmaceutical composition, including a vaccine, for the treatment of a cancer, such as pancreatic, lung cancer, colorectal cancer, gastric cancer, or breast cancer.

[0127] These immunogenic TAA polypeptides can be prepared by methods known in the art in light of the present disclosure. The capability of the polypeptides to elicit an immune response can be measured in in vitro assays or in vivo assays. In vitro assays for determining the capability of a polypeptide or DNA construct to elicit immune responses are known in the art. One example of such in vitro assays is to measure the capability of the polypeptide or nucleic acid expressing a polypeptide to stimulate T cell response as described in U.S. Pat. No. 7,387,882, the disclosure of which is incorporated in this application. The assay method comprises the steps of: (1) contacting antigen presenting cells in culture with an antigen thereby the antigen can be taken up and processed by the antigen presenting cells, producing one or more processed antigens; (2) contacting the antigen presenting cells with T cells under conditions sufficient for the T cells to respond to one or more of the processed antigens; (3) determining whether the T cells respond to one or more of the processed antigens. The T cells used may be CD8⁺ T cells or CD4⁺ T cells. T cell response may be determined by measuring the release of one or more cytokines, such as interferon-gamma and interleukin-2, and lysis of the antigen presenting cells (tumor cells). B cell response may be determined by measuring the production of antibodies.

[0128] B-1. Immunogenic MUC1 Polypeptides

[0129] In one aspect, the present disclosure provides immunogenic MUC1 polypeptides derived from a human native MUC1 by introducing one or more mutations to the human native MUC1 protein. Examples of mutations include deletion of some, but not all, of the tandem repeats of 20 amino acids in the VNTR region of the MUC1 protein, deletion of the signal peptide sequence in whole or in part, and deletion of amino acids of non-consensus amino acid sequences found in the MUC1 isoforms. Thus, in some embodiments, the immunogenic MUC1 polypeptides comprise (1) the amino acid sequence of 3 to 30 tandem repeats of 20 amino acids of a human MUC1 protein and (2) the amino acid sequences of the human MUC1 protein that flank the VNTR region. In some particular embodiments, the immunogenic MUC1 polypeptides comprise (1) the amino acid sequence of 5 to 25 tandem repeats of the human MUC1 and (2) the amino acid sequences of the human MUC1 protein that flank the VNTR region. In some embodiments, the immunogenic MUC1 polypeptides consist of (1) the amino acid sequence of 3 to 30 tandem repeats of 20 amino acids of a human MUC1 protein and (2) the amino acid sequences of the human MUC1 protein that flank the VNTR region. In some particular embodiments, the immunogenic MUC1 polypeptides consist of (1) the amino acid sequence of 5 to 25 tandem repeats of the human MUC1 and (2) the amino acid sequences of the human MUC1 protein that flank the VNTR region. In some further embodiments, the immunogenic MUC1 polypeptides are in cytoplasmic form (or “cMUC1”). The term “cytoplasmic form” refers to an immunogenic MUC1 polypeptide that lacks in whole or in part the secretory sequence (amino acids 1-23; also known as “signal peptide sequence”) of the human native MUC1 protein. The deletion of amino acids of the secretory sequence is expected to prevent the polypeptide from entering the secretory pathway as it is expressed in the cells. In some other embodiments, the immunogenic MUC1 polypeptides are in membrane-bound form. The immunogenic MUC1 polypeptides can be derived, constructed, or prepared from the amino acid sequence of any of the human MUC1 isoforms known in the art or discovered in the future, including, for example, Uniprot isoforms 1, 2, 3, 4, 5, 6, Y, 8, 9, F, Y-LSP, S2, M6, ZD, T10, E2, and J13 (Uniprot P15941-1 through P15941-17, respectively). In some embodiments, the immunogenic MUC1 polypeptides comprise an amino acid sequence that is part of human MUC1 isoform 1 wherein the amino acid sequence of the human MUC1 isoform 1 is set forth in SEQ ID NO: 1. In some embodiments, the immunogenic MUC1 polypeptides consist of an amino acid sequence that is part of human MUC1 isoform 1 wherein the amino acid sequence of the human MUC1 isoform 1 is set forth in SEQ ID NO: 1. In a specific embodiment, the immunogenic MUC1 polypeptide comprises amino acids 22-225 and 946-1255 of the amino acid sequence of SEQ ID NO:1. In some other specific embodiments, the present disclosure provides an immunogenic MUC1 polypeptide selected from:

[0130] (1) a polypeptide comprising or consisting of the amino acid sequence of SEQ ID NO:5 (Plasmid 1027 polypeptide);

[0131] (2) a polypeptide comprising or consisting of amino acids 4-537 of SEQ ID NO:5;

[0132] (3) a polypeptide comprising or consisting of amino acids 24-537 of SEQ ID NO:5;

[0133] (4) a polypeptide comprising or consisting of the amino acid sequence of SEQ ID NO:7 (Plasmid 1197 polypeptide);

[0134] (5) a polypeptide comprising or consisting of amino acids 4-517 of SEQ ID NO:7;

[0135] (6) a polypeptide comprising or consisting of amino acids 4-517 of SEQ ID NO:7, wherein in SEQ ID NO:7 the amino acid at position 513 is T; and

[0136] (7) a functional variant of any of the polypeptides of (1)-(6) above.

[0137] In some specific embodiments, the immunogenic MUC1 polypeptides comprise the amino acid sequence of SEQ ID NO:5 (Plasmid 1027 polypeptide) or SEQ ID NO:7 (Plasmid 1197 polypeptide). In some specific embodiments, the immunogenic MUC1 polypeptides consists of the amino acid sequence of SEQ ID NO:5 (Plasmid 1027 polypeptide) or SEQ ID NO:7 (Plasmid 1197 polypeptide).

[0138] In one aspect, the present invention provides a functional variant of any of the immunogenic MUC1 polypeptides disclosed herein.

[0139] B-2. Immunogenic TERT Polypeptides

[0140] In another aspect, the present disclosure provides immunogenic TERT polypeptides derived from a human TERT protein by deletion of up to 600 of the N-terminal amino acids of the TERT protein. Thus, an immunogenic TERT polypeptide may comprise the C-terminal amino acid sequence starting from position 601 of any human TERT protein isoform. In some embodiments, the immunogenic TERT polypeptides comprise the amino acid sequence of TERT isoform 1 set forth in SEQ ID NO:3, wherein up to about 600 amino acids from the N-terminus (amino terminus) of the amino acid sequence of TERT isoform 1 are absent. Any number of amino acids up to 600 from the N-terminus of the TERT isoform 1 may be absent in the immunogenic TERT polypeptide. For example, the N-terminal amino acids from position 1 through position 50, 100, 50, 200, 250, 300, 350, 400, 450, 500, 550, or 600 of the TERT isoform 1 of SEQ ID NO:3 may be absent from the immunogenic TERT polypeptide. Thus, an immunogenic TERT polypeptide may comprise amino acids 51-1132, 101-1132, 151-1132, 201-1132, 251-1132, 301-1132, 351-1132, 401-1132, 451-1132, 501-1132, or 551-1132 of SEQ ID NO:3. In one embodiment, the immunogenic TERT polypeptide comprises amino acids 601-1132 of the amino acid sequence of SEQ ID NO:3. In another embodiment, the present disclosure provides an immunogenic TERT polypeptide that comprises amino acids 241-1132 of the amino acid sequence of SEQ ID NO:3.

[0141] An immunogenic TERT polypeptide may consist of amino acids 51-1132, 101-1132, 151-1132, 201-1132, 251-1132, 301-1132, 351-1132, 401-1132, 451-1132, 501-1132, or 551-1132 of SEQ ID NO:3. In one embodiment, the immunogenic TERT polypeptide consists of amino acids 601-1132 of the amino acid sequence of SEQ ID NO:3. In another embodiment, the present disclosure provides an immunogenic TERT polypeptide that consists of amino acids 241-1132 of the amino acid sequence of SEQ ID NO:3.

[0142] The immunogenic TERT polypeptides may also be constructed from other TERT isoforms. Where the immunogenic TERT polypeptides are constructed from TERT isoforms with C-terminal truncations, such as isoform 2, 3, or 4, it is preferred that fewer amino acids are deleted from the N-terminus of the protein.

[0143] In some further embodiments, the immunogenic TERT polypeptide further comprises one or more amino acid mutations that inactivate the TERT catalytic domain. Examples of such amino acid mutations include substitution of aspartic acid with alanine at position 712 of SEQ ID NO:3 (D712A) and substitution of valine with isoleucine at position 713 of SEQ ID NO:3 (V713I). In some embodiments the immunogenic TERT polypeptide comprises both mutations D712A and V713I. In an embodiment said mutations include a substitution of aspartic acid at position 712 of SEQ ID NO:3 and/or substitution of valine at position 713 of SEQ ID NO:3 (V713I) wherein said mutation(s) inactivates the TERT catalytic domain. In another embodiment said mutation consists of a substitution of aspartic acid at position 712 of SEQ ID NO:3 and/or substitution of valine at position 713 of SEQ ID NO:3 (V713I) wherein said mutation(s) inactivates the TERT catalytic domain. In still another embodiment said mutation consists of a substitution of aspartic acid with alanine at position 712 of SEQ ID NO:3 (D712A) and/or a substitution of valine with isoleucine at position 713 of SEQ ID NO:3 (V713I).

[0144] In some specific embodiments, the present disclosure provides an immunogenic TERT polypeptide selected from:

[0145] (1) a polypeptide comprising or consisting of the amino acid sequence of SEQ ID NO:9 (Plasmid 1112 Polypeptide) or amino acids 2-893 of SEQ ID NO:9;

[0146] (2) a polypeptide comprising or consisting of the amino acid sequence of SEQ ID NO:11 (Plasmid 1326 Polypeptide) or amino acids 3-791 of SEQ ID NO:11;

[0147] (3) a polypeptide comprising or consisting of the amino acid sequence of SEQ ID NO:13 (Plasmid 1330 Polypeptide) or amino acids 4-594 of SEQ ID NO:13; or

[0148] (4) a polypeptide that is a functional variant of any of the polypeptides of (1)-(3) above.

[0149] In one aspect, the present invention provides a functional variant of any of the immunogenic TERT polypeptides disclosed herein.

[0150] B-3. Immunogenic CEA Polypeptides

[0151] In another aspect, the present disclosure provides isolated immunogenic CEA polypeptides derived from a human native CEA by introducing one or more mutations to the human native CEA precursor protein. Examples of the introduced mutations include deletion of one, two, three, four, or five of the C2-like domains, deletion of the signal peptide sequence in whole or in part, and deletion of some or all of the amino acids of the propeptide. Thus, in some embodiments, the immunogenic CEA polypeptides provided by the present disclosure comprise (1) the amino acid sequence of the N-domain and (2) the amino acid sequence of 1 to 5 C2-like domains of a human CEA protein. In some particular embodiments, the immunogenic CEA polypeptides comprise (1) the amino acid sequence of at least four C2-like domains, such as A2, B2, A3, and B3, and (2) the amino acid sequence of the N-domain. In some further embodiments, the immunogenic CEA polypeptides are in cytoplasmic form (or “cCEA”). The term “cytoplasmic form” refers to an immunogenic CEA polypeptide that lacks in whole or in part the signal peptide sequence (amino acids 1-34) of the human native CEA precursor protein. The deletion of amino acids of the signal peptide is expected to prevent the polypeptide from entering the secretory pathway as it is expressed in the cells. In some other embodiments, the immunogenic CEA polypeptides are in the membrane-bound form (or “mCEA”). An immunogenic mCEA polypeptide includes amino acids of the signal peptide and, after expressed by a host cell, remains bound to, or otherwise associated with, the membrane of the host cell.

[0152] The immunogenic CEA polypeptides provided by the present disclosure can be derived, constructed, or prepared from the amino acid sequence of any of the human CEA isoforms known in the art or discovered in the future. In some embodiments, the immunogenic CEA polypeptides comprise an amino acid sequence that is part of human CEA isoform 1 precursor protein having amino acid sequence of SEQ ID NO:2.

[0153] In some specific embodiments, the present disclosure provides any of the following immunogenic CEA polypeptides:

[0154] (1) a polypeptide comprising amino acids 2-702 of SEQ ID NO:2, amino acids 323-702 of SEQ ID NO:2, or amino acids 323-677 of SEQ ID NO:2;

[0155] (2) a polypeptide consisting of amino acids 2-702 of SEQ ID NO:2, amino acids 323-702 of SEQ ID NO:2, or amino acids 323-677 of SEQ ID NO:2;

[0156] (3) a polypeptide comprising amino acids of SEQ ID NO:15 (amino acid sequence encoded by Plasmid 1361) or amino acids 4-704 of SEQ ID NO:15;

[0157] (4) a polypeptide consisting of amino acids of SEQ ID NO:15 (amino acid sequence encoded by Plasmid 1361) or amino acids 4-704 of SEQ ID NO:15;

[0158] (5) a polypeptide comprising the amino acid sequence of SEQ ID NO:17 (amino acid sequence encoded by Plasmid 1386) or amino acids 4-526 of SEQ ID NO:17;

[0159] (6) a polypeptide consisting of the amino acid sequence of SEQ ID NO:17 (amino acid sequence encoded by Plasmid 1386) or amino acids 4-526 of SEQ ID NO:17;

[0160] (7) a polypeptide comprising the sequence of SEQ ID NO:19 (amino acid sequence encoded by Plasmid 1390) or amino acids 4-468 of SEQ ID NO:19;

[0161] (8) a polypeptide consisting of the sequence of SEQ ID NO:19 (amino acid sequence encoded by Plasmid 1390) or amino acids 4-468 of SEQ ID NO:19; or

[0162] (9) a polypeptide that is a functional variant of any of the polypeptides of (1)-(8) above.

[0163] In one aspect, the present invention provides a functional variant of any of the immunogenic TERT polypeptides disclosed herein.

### C. Antigen Constructs Encoding One or More Immunogenic TAA Polypeptides

[0164] In some aspects, the present disclosure provides an isolated nucleic acid molecule that encodes one, two, three, or more separate immunogenic TAA polypeptides. Such a nucleic acid molecule is also referred to as “antigen construct” in the present disclosure. A nucleic acid molecule that encodes only one immunogenic TAA polypeptide is also referred to herein as a “single-antigen construct” and a nucleic acid molecule that encodes more than one immunogenic TAA polypeptide is also referred to as a “multi-antigen construct.” A nucleic acid molecule that encodes two different immunogenic TAA polypeptides is also referred to as a “dual-antigen construct” and a nucleic acid molecule that encodes three different immunogenic TAA polypeptides is also referred to as a “triple-antigen construct.” The nucleic acid molecules can be deoxyribonucleic acids (DNA) or ribonucleic acids (RNA). Thus, a nucleic acid molecule can comprise a nucleotide sequence disclosed herein wherein thymidine (T) can also be uracil (U), which reflects the differences between the chemical structures of DNA and RNA. In reference to a nucleotide sequence of a RNA which corresponds to a nucleotide sequence of a DNA in the present disclosure, the term “correspond” or “corresponding” refers to a nucleotide sequence of the RNA that is identical to the reference nucleotide sequence of the DNA except that thymidine (T) in the DNA nucleotide sequence is replaced with uracil (U) in the RNA nucleotide sequence. The nucleic acid molecules can be in modified forms, single or double stranded forms, or linear or circular forms.

[0165] The antigen constructs, including both DNA and RNA constructs, can be prepared using methods known in the art in light of the present disclosure. Method for making single-antigen constructs and multi-antigen constructs is further described herein below. Additionally, it's well established that the injection of mRNA into host cells leads to expression of encoded proteins and immunological responses. The in vitro transcribed mRNA can be produced stably and the encoded protein can be translated efficiently through the use of various elements/systems known in the art (such as UTR's, PolyA, capping system, and codon optimization). Further, the fusion of lysosomal or endosomal targeting signals to mRNA encoded polypeptides can enhance the T-cell immune responses. mRNA can be delivered unformulated or through EP or formulated in lipids or other vehicles.

[0166] C-1. CEA Single-Antigen Constructs

[0167] In some embodiments, the present disclosure provides antigen constructs that encode any of the immunogenic CEA polypeptides described herein above.

[0168] In some specific embodiments, the antigen construct encodes an immunogenic CEA polypeptide selected from:

[0169] (1) a polypeptide comprising amino acids 2-702 of SEQ ID NO:2, amino acids 323-702 of SEQ ID NO:2, or amino acids 323-677 of SEQ ID NO:2;

[0170] (2) a polypeptide comprising amino acids of SEQ ID NO:15 (amino acid sequence encoded by Plasmid 1361) or amino acids 4-704 of SEQ ID NO:15;

[0171] (3) a polypeptide comprising the amino acid sequence of SEQ ID NO:17 (amino acid sequence encoded by Plasmid 1386) or amino acids 4-526 of SEQ ID NO:17;

[0172] (4) a polypeptide comprising the sequence of SEQ ID NO:19 (amino acid sequence encoded by Plasmid 1390) or amino acids 4-468 of SEQ ID NO:19; or

[0173] (5) a polypeptide that is a functional variant of any of the polypeptides of (1)-(4) above.

[0174] In some specific embodiments, the antigen construct encodes an immunogenic CEA polypeptide selected from:

[0175] (1) a polypeptide consisting of amino acids 2-702 of SEQ ID NO:2, amino acids 323-702 of SEQ ID NO:2, or amino acids 323-677 of SEQ ID NO:2;

[0176] (2) a polypeptide consisting of amino acids of SEQ ID NO:15 (amino acid sequence encoded by Plasmid 1361) or amino acids 4-704 of SEQ ID NO:15;

[0177] (3) a polypeptide consisting of the amino acid sequence of SEQ ID NO:17 (amino acid sequence encoded by Plasmid 1386) or amino acids 4-526 of SEQ ID NO:17;

[0178] (4) a polypeptide consisting of the sequence of SEQ ID NO:19 (amino acid sequence encoded by Plasmid 1390) or amino acids 4-468 of SEQ ID NO:19; or

[0179] (5) a polypeptide that is a functional variant of any of the polypeptides of (1)-(4) above.

[0180] In some particular embodiments, the present disclosure provides an antigen construct that is a DNA and comprises a nucleotide sequence selected from the group consisting of:

[0181] (1) the nucleotide sequence of SEQ ID NO:14 (Plasmid 1361 open reading frame) or a nucleotide sequence comprising nucleotides 10-2112 of SEQ ID NO:14;

[0182] (2) the nucleotide sequence of SEQ ID NO:16 (Plasmid 1386 open reading frame) or a nucleotide sequence comprising nucleotides 10-1578 of SEQ ID NO:16;

[0183] (3) the nucleotide sequence of SEQ ID NO:18 (Plasmid 1390 open reading frame) or a nucleotide sequence comprising nucleotides 10-1404 of SEQ ID NO:18; and

[0184] (4) a nucleotide sequence that is a degenerate variant of the nucleotide sequences of (1)-(3).

[0185] In some other particular embodiments, the present disclosure provides an antigen construct that is a DNA and consists of a nucleotide sequence selected from the group consisting of:

[0186] (1) the nucleotide sequence of SEQ ID NO:14 (Plasmid 1361 open reading frame) or a nucleotide sequence consisting of nucleotides 10-2112 of SEQ ID NO:14;

[0187] (2) the nucleotide sequence of SEQ ID NO:16 (Plasmid 1386 open reading frame) or a nucleotide sequence consisting of nucleotides 10-1578 of SEQ ID NO:16;

[0188] (3) the nucleotide sequence of SEQ ID NO:18 (Plasmid 1390 open reading frame) or a nucleotide sequence consisting of nucleotides 10-1404 of SEQ ID NO:18; and

[0189] (4) a nucleotide sequence that is a degenerate variant of the nucleotide sequences of (1)-(3). In some other particular embodiments, the present disclosure provides an antigen construct that is a RNA and comprises a nucleotide sequence that corresponds to a nucleotide sequence selected from the group consisting of:

[0190] (1) the nucleotide sequence of SEQ ID NO:14 (Plasmid 1361 open reading frame) or a nucleotide sequence comprising nucleotides 10-2112 of SEQ ID NO:14;

[0191] (2) the nucleotide sequence of SEQ ID NO:16 (Plasmid 1386 open reading frame) or a nucleotide sequence comprising nucleotides 10-1578 of SEQ ID NO:16;

[0192] (3) the nucleotide sequence of SEQ ID NO:18 (Plasmid 1390 open reading frame) or a nucleotide sequence comprising nucleotides 10-1404 of SEQ ID NO:18; and

[0193] (4) a nucleotide sequence that is a degenerate variant of the nucleotide sequences of (1)-(3).

[0194] C-2. Multi-Antigen Constructs

[0195] In another aspect, the present disclosure provides antigen constructs that each encode two, three, or more different immunogenic TAA polypeptides.

[0196] Methods and techniques for construction of vectors for co-expression of two or more polypeptides from a single nucleic acid (also known in the art as “multicistronic vectors”) are known in the art. The multi-antigen constructs provided by the present disclosure can be prepared using such techniques in light of the disclosure. For example, a multi-antigen construct can be constructed by incorporating multiple independent promoters into a single plasmid (Huang, Y., Z. Chen, et al. (2008). “Design, construction, and characterization of a dual-promoter multigenic DNA vaccine directed against an HIV-1 subtype C/B′ recombinant.” J Acquir Immune Defic Syndr 47(4): 403-411; Xu, K., Z. Y. Ling, et al. (2011). “Broad humoral and cellular immunity elicited by a bivalent DNA vaccine encoding HA and NP genes from an H5N1 virus.” Viral Immunol 24(1): 45-56). The plasmid can be engineered to carry multiple expression cassettes, each consisting of a) a eukaryotic promoter for initiating RNA polymerase dependent transcription, with or without an enhancer element, b) a gene encoding a target antigen, and c) a transcription terminator sequence. Upon delivery of the plasmid to the transfected cell nucleus, transcription will be initiated from each promoter, resulting in the production of separate mRNAs, each encoding one of the target antigens. The mRNAs will be independently translated, thereby producing the desired antigens.

[0197] Multi-antigen constructs provided by the present disclosure can also be constructed through the use of viral 2A peptides (Szymczak, A. L. and D. A. Vignali (2005). “Development of 2A peptide-based strategies in the design of multicistronic vectors.” Expert Opin Biol Ther 5(5): 627-638; de Felipe, P., G. A. Luke, et al. (2006). “E unum pluribus: multiple proteins from a self-processing polyprotein.” Trends Biotechnol 24(2): 68-75; Luke, G. A., P. de Felipe, et al. (2008). “Occurrence, function and evolutionary origins of ‘2A-like’ sequences in virus genomes.” J Gen Virol 89 (Pt 4): 1036-1042; Ibrahimi, A., G. Vande Velde, et al. (2009). “Highly efficient multicistronic lentiviral vectors with peptide 2A sequences.” Hum Gene Ther 20(8): 845-860; Kim, J. H., S. R. Lee, et al. (2011). “High cleavage efficiency of a 2A peptide derived from porcine teschovirus-1 in human cell lines, zebrafish and mice.” PLoS One 6(4): e18556). These peptides, also called cleavage cassettes or CHYSELs (cis-acting hydrolase elements), are approximately 20 amino acids long with a highly conserved carboxy terminal D-V/I-EXNPGP motif. These peptides are rare in nature, most commonly found in viruses such as Foot-and-mouth disease virus (FMDV), Equine rhinitis A virus (ERAV), Equine rhinitis B virus (ERBV), Encephalomyocarditis virus (EMCV), Porcine teschovirus (PTV), and Thosea asigna virus (TAV) (Luke, G. A., P. de Felipe, et al. (2008). “Occurrence, function and evolutionary origins of ‘2A-like’ sequences in virus genomes.” J Gen Virol 89 (Pt 4): 1036-1042). An amino acid sequence of some of these peptides is provided in Table 17. With a 2A-based multi-antigen expression strategy, genes encoding multiple target antigens are linked together in a single open reading frame (ORF), separated by sequences encoding viral 2A peptides. The entire open reading frame can be cloned into a vector with a single promoter and terminator. Upon delivery of the constructs to a host cell, mRNA encoding the multiple antigens will be transcribed and translated as a single polyprotein. During translation of the 2A peptides, ribosomes skip the bond between the C-terminal glycine and proline. The ribosomal skipping acts like a cotranslational autocatalytic “cleavage” that releases the peptide sequences upstream of the 2A peptide from those downstream. The incorporation of a 2A peptide between two protein antigens may result in the addition of ˜20 amino acids onto the C-terminus of the upstream polypeptide and 1 amino acid (proline) to the N-terminus of downstream protein. In an adaptation of this methodology, protease cleavage sites can be incorporated at the N terminus of the 2A cassette such that ubiquitous proteases will cleave the cassette from the upstream protein (Fang, J., S. Yi, et al. (2007). “An antibody delivery system for regulated expression of therapeutic levels of monoclonal antibodies in vivo.” Mol Ther 15(6): 1153-1159). Examples of specific 2A-peptide sequences that may be used in construction of the multi-antigen constructs of the present disclosure include those that are disclosed in Andrea L. Szymczak & Darrio AA Vignali: Development of 2A peptide-based strategies in the design of multicistronic vectors. Expert Opinion Biol. Ther. (2005) 5(5) 627-638, as well as in international patent application WO2015/063674, the disclosure of which is incorporated herein by reference.

[0198] Another method that may be used for constructing the multi-antigen constructs involves the use of an internal ribosomal entry site, or IRES. Internal ribosomal entry sites are RNA elements found in the 5′ untranslated regions of certain RNA molecules (Bonnal, S., C. Boutonnet, et al. (2003). “IRESdb: the Internal Ribosome Entry Site database.” Nucleic Acids Res 31(1): 427-428). They attract eukaryotic ribosomes to the RNA to facilitate translation of downstream open reading frames. Unlike normal cellular 7-methylguanosine cap-dependent translation, IRES-mediated translation can initiate at AUG codons far within an RNA molecule. The highly efficient process can be exploited for use in multi-cistronic expression vectors (Bochkov, Y. A. and A. C. Palmenberg (2006). “Translational efficiency of EMCV IRES in bicistronic vectors is dependent upon IRES sequence and gene location.” Biotechniques 41(3): 283-284, 286, 288). Typically, two transgenes are inserted into a vector between a promoter and transcription terminator as two separate open reading frames separated by an IRES. Upon delivery of the constructs to a host cell, a single long transcript encoding both transgenes will be transcribed. The first ORF will be translated in the traditional cap-dependent manner, terminating at a stop codon upstream of the IRES. The second ORF will be translated in a cap-independent manner using the IRES. In this way, two independent proteins can be produced from a single mRNA transcribed from a vector with a single expression cassette. Examples of IRES sequences includes poliovirus (PV) IRES, encephalomyocarditis virus (EMCV) IRES, Foot-and-mouth disease virus (FMDV) IRES, Hepatitis A virus IRES, Hepatitis B virus IRES, Kaposi's sarcoma-associated herpesvirus (KSHV) IRES, and classical swine fever virus IRES. A nucleotide sequence of the EMCV IRES is disclosed in WO2013/165754 (FIG. 3) and is set forth in SEQ ID NO:93 in the present disclosure. The minimal EMCV IRES element excludes the 15 nucleotides of the 3′-end (which represent first 5 codons of the EMCV L protein) of nucleotide sequence of SEQ ID NO:93.

[0199] The nucleotide sequence that is inserted between two coding sequences or transgenes in an open reading frame (ORF) of a nucleic acid molecule and functions to allow co-expression or translation of two separate gene products from the nucleic acid molecule is referred to as “spacer nucleotide sequence” in the present disclosure. Examples of specific spacer nucleotide sequences that may be used in the multi-antigen constructs include eukaryotic promoters, nucleotide sequences encoding a 2A peptide, and internal ribosomal entry site (IRES) sequences. Examples of specific 2A peptides include 2A peptides of acute bee paralysis virus (ABP2A), cricket paralysis virus (CrP2A), equine rhinitis A virus (ERA2A), equine rhinitis B virus (ERB2A), encephalomyocarditis virus (EMC2A), foot-and-mouth disease virus (FMD2A or F2A), human rotavirus (HT2A), Infectious flacherie virus (IF2A), porcine teschovirus (PT2A or P2A), porcine rotavirus (PR2A), and Thosea asigna virus (T2A, TA2A, or TAV2A).

[0200] In some aspects, the present disclosure provides an antigen construct comprising (i) at least one coding nucleotide sequence encoding an immunogenic CEA polypeptide and (ii) one or more nucleotide sequences encoding one or more other immunogenic TAA polypeptides, such as an immunogenic TERT polypeptide, an immunogenic MUC1 polypeptide, an immunogenic MSLN polypeptide, an immunogenic PSA polypeptide, an immunogenic PSMA polypeptide, or an immunogenic PSCA polypeptide.

[0201] In some embodiments, the present disclosure provides an antigen construct comprising (i) at least one coding nucleotide sequence encoding an immunogenic CEA polypeptide and (ii) at least one coding nucleotide sequence encoding either an immunogenic TERT polypeptide or an immunogenic MUC1 polypeptide. The nucleotide sequence encoding the immunogenic CEA polypeptide may be either upstream or downstream of the other coding nucleotide sequence. The construct may further comprise a spacer nucleotide sequence between the coding nucleotide sequences. The structure of such a dual antigen construct is shown in formula (I) and formula (II):

TAA-SPACER-CEA (I)

CEA-SPACER-TAA (II)

wherein in each of formulas (I) and (II): (i) CEA represents a nucleotide sequence encoding an immunogenic CEA polypeptide; (ii) TAA represents a nucleotide sequence encoding either an immunogenic MUC1 polypeptide or an immunogenic TERT polypeptide; and (iii) SPACER is a spacer nucleotide sequence and may be absent. Examples of spacer nucleotide sequences that may be included in the dual-antigen constructs include nucleotide sequences encoding a foot-and-mouth disease virus 2A peptide (FMD2A or FMDV2A), equine rhinitis A virus 2A peptide (ERA2A), Equine rhinitis B virus 2A peptide (ERB2A), encephalomyocarditis virus 2A peptide (EMC2A or EMCV2A), porcine teschovirus 2A peptide (PT2A), and Thosea asigna virus 2A peptide (T2A, TA2A, or TAV2A). In some embodiments, the antigen construct encodes any of the immunogenic CEA polypeptides described herein above. In some embodiments, the antigen construct encodes any of the immunogenic TERT polypeptides described herein above. In some embodiments, the antigen construct encodes any of the immunogenic MUC1 polypeptides described herein above.

[0202] In some other aspects, the present disclosure provides a multi-antigen construct comprising (i) at least one coding nucleotide sequence encoding an immunogenic CEA polypeptide, (ii) at least one coding nucleotide sequence encoding an immunogenic MUC1 polypeptide, and (iii) at least one coding nucleotide sequence encoding an immunogenic TERT polypeptide. In some embodiments, the multi-antigen construct further comprises a spacer nucleotide sequence. The structure of a multi-antigen construct is shown in formula (III):

TAA1-SPACER1-TAA2-SPACER2-TAA3 (III)

wherein in formula (III): (i) TAA1, TAA2, and TAA3 each represent a nucleotide sequence encoding an immunogenic TAA polypeptide selected from the group consisting of an immunogenic MUC1 polypeptide, an immunogenic CEA polypeptide, and an immunogenic TERT polypeptide, wherein TAA1, TAA2, and TAA3 encode different immunogenic TAA polypeptides; and (ii) SPACER1 and SPACER2 each represent a spacer nucleotide sequence, wherein (a) SPACER1 and SPACER2 may be the same or different and (b) one of or both of SPACER1 and SPACER2 may be absent. In some embodiments, SPACER1 and SPACER2 are, independently, a nucleotide sequence encoding a 2A peptide, or a nucleotide sequence encoding GGSGG. In some embodiments, SPACER1 and SPACER2 are a nucleotide sequence encoding a 2A peptide. In some embodiments, SPACER1 and SPACER2 are a nucleotide sequence encoding GGSGG. In some embodiments, SPACER1 is a nucleotide sequence encoding a 2A peptide and SPACER2 is a nucleotide sequence encoding GGSGG. In some embodiments, SPACER1 is a nucleotide sequence encoding GGSGG and SPACER2 is a nucleotide sequence encoding a 2A peptide. In some embodiments, the antigen construct encodes any of the immunogenic CEA polypeptides described herein above. In some embodiments, the antigen construct encodes any of the immunogenic TERT polypeptides described herein above. In some embodiments, the antigen construct encodes any of the immunogenic MUC1 polypeptides described herein above.

[0203] In some embodiments, the present disclosure provides a multi-antigen construct of formula (III), wherein in formula (III): (i) TAA1 is a nucleotide sequence encoding an immunogenic MUC1 polypeptide; (ii) TAA2 is a nucleotide sequence encoding an immunogenic CEA polypeptide; and (iii) TAA3 is a nucleotide sequence encoding an immunogenic TERT polypeptide. In some embodiments, SPACER1 and SPACER2 are, independently, a nucleotide sequence encoding a 2A peptide, or a nucleotide sequence encoding GGSGG. In some embodiments, SPACER1 and SPACER2 are a nucleotide sequence encoding a 2A peptide. In some embodiments, SPACER1 and SPACER2 are a nucleotide sequence encoding GGSGG. In some embodiments, SPACER1 is a nucleotide sequence encoding a 2A peptide and SPACER2 is a nucleotide sequence encoding GGSGG. In some embodiments, SPACER1 is a nucleotide sequence encoding GGSGG and SPACER2 is a nucleotide sequence encoding a 2A peptide. In some embodiments, the antigen construct encodes any of the immunogenic CEA polypeptides described herein above. In some embodiments, the antigen construct encodes any of the immunogenic TERT polypeptides described herein above. In some embodiments, the antigen construct encodes any of the immunogenic MUC1 polypeptides described herein above.

[0204] In some other embodiments, the present disclosure provides a multi-antigen construct of formula (III), wherein in formula (III): (i) TAA1 is a nucleotide sequence encoding an immunogenic MUC1 polypeptide; (ii) TAA2 is a nucleotide sequence encoding an immunogenic TERT polypeptide; and (iii) TAA3 is a nucleotide sequence encoding an immunogenic CEA polypeptide. In some embodiments, SPACER1 and SPACER2 are, independently, a nucleotide sequence encoding a 2A peptide, or a nucleotide sequence encoding GGSGG. In some embodiments, SPACER1 and SPACER2 are a nucleotide sequence encoding a 2A peptide. In some embodiments, SPACER1 and SPACER2 are a nucleotide sequence encoding GGSGG. In some embodiments, SPACER1 is a nucleotide sequence encoding a 2A peptide and SPACER2 is a nucleotide sequence encoding GGSGG. In some embodiments, SPACER1 is a nucleotide sequence encoding GGSGG and SPACER2 is a nucleotide sequence encoding a 2A peptide. In some embodiments, the antigen construct encodes any of the immunogenic CEA polypeptides described herein above. In some embodiments, the antigen construct encodes any of the immunogenic TERT polypeptides described herein above. In some embodiments, the antigen construct encodes any of the immunogenic MUC1 polypeptides described herein above.

[0205] In still other embodiments, the present disclosure provides a multi-antigen construct of formula (III), wherein in formula (III): (i) TAA1 is a nucleotide sequence encoding an immunogenic CEA polypeptide; (ii) TAA2 is a nucleotide sequence encoding an immunogenic TERT polypeptide; and (iii) TAA3 is a nucleotide sequence encoding an immunogenic MUC1 polypeptide. In some embodiments, SPACER1 and SPACER2 are, independently, a nucleotide sequence encoding a 2A peptide, or a nucleotide sequence encoding GGSGG. In some embodiments, SPACER1 and SPACER2 are a nucleotide sequence encoding a 2A peptide. In some embodiments, SPACER1 and SPACER2 are a nucleotide sequence encoding GGSGG. In some embodiments, SPACER1 is a nucleotide sequence encoding a 2A peptide and SPACER2 is a nucleotide sequence encoding GGSGG. In some embodiments, SPACER1 is a nucleotide sequence encoding GGSGG and SPACER2 is a nucleotide sequence encoding a 2A peptide. In some embodiments, the antigen construct encodes any of the immunogenic CEA polypeptides described herein above. In some embodiments, the antigen construct encodes any of the immunogenic TERT polypeptides described herein above. In some embodiments, the antigen construct encodes any of the immunogenic MUC1 polypeptides described herein above.

[0206] In some further embodiments, the present disclosure provides a multi-antigen construct of formula (III), wherein in formula (III): (i) TAA1 is a nucleotide sequence encoding an immunogenic CEA polypeptide; (ii) TAA2 is a nucleotide sequence encoding an immunogenic MUC1 polypeptide; and (iii) TAA3 is a nucleotide sequence encoding an immunogenic TERT polypeptide. In some embodiments, SPACER1 and SPACER2 are, independently, a nucleotide sequence encoding a 2A peptide, or a nucleotide sequence encoding GGSGG. In some embodiments, SPACER1 and SPACER2 are a nucleotide sequence encoding a 2A peptide. In some embodiments, SPACER1 and SPACER2 are a nucleotide sequence encoding GGSGG. In some embodiments, SPACER1 is a nucleotide sequence encoding a 2A peptide and SPACER2 is a nucleotide sequence encoding GGSGG. In some embodiments, SPACER1 is a nucleotide sequence encoding GGSGG and SPACER2 is a nucleotide sequence encoding a 2A peptide. In some embodiments, the antigen construct encodes any of the immunogenic CEA polypeptides described herein above. In some embodiments, the antigen construct encodes any of the immunogenic TERT polypeptides described herein above. In some embodiments, the antigen construct encodes any of the immunogenic MUC1 polypeptides described herein above.

[0207] In still other embodiments, the present disclosure provides a multi-antigen construct of formula (III), wherein in formula (III): (i) TAA1 is a nucleotide sequence encoding an immunogenic TERT polypeptide; (ii) TAA2 is a nucleotide sequence encoding an immunogenic MUC1 polypeptide; and (iii) TAA3 is a nucleotide sequence encoding an immunogenic CEA polypeptide. In some embodiments, SPACER1 and SPACER2 are, independently, a nucleotide sequence encoding a 2A peptide, or a nucleotide sequence encoding GGSGG. In some embodiments, SPACER1 and SPACER2 are a nucleotide sequence encoding a 2A peptide. In some embodiments, SPACER1 and SPACER2 are a nucleotide sequence encoding GGSGG. In some embodiments, SPACER1 is a nucleotide sequence encoding a 2A peptide and SPACER2 is a nucleotide sequence encoding GGSGG. In some embodiments, SPACER1 is a nucleotide sequence encoding GGSGG and SPACER2 is a nucleotide sequence encoding a 2A peptide. In some embodiments, the antigen construct encodes any of the immunogenic CEA polypeptides described herein above. In some embodiments, the antigen construct encodes any of the immunogenic TERT polypeptides described herein above. In some embodiments, the antigen construct encodes any of the immunogenic MUC1 polypeptides described herein above.

[0208] In still other embodiments, the present disclosure provides a multi-antigen construct of formula (III), wherein in formula (III): (i) TAA1 is a nucleotide sequence encoding an immunogenic TERT polypeptide; (ii) TAA2 is a nucleotide sequence encoding an immunogenic CEA polypeptide; and (iii) TAA3 is a nucleotide sequence encoding an immunogenic MUC1 polypeptide. In some embodiments, SPACER1 and SPACER2 are, independently, a nucleotide sequence encoding a 2A peptide, or a nucleotide sequence encoding GGSGG. In some embodiments, SPACER1 and SPACER2 are a nucleotide sequence encoding a 2A peptide. In some embodiments, SPACER1 and SPACER2 are a nucleotide sequence encoding GGSGG. In some embodiments, SPACER1 is a nucleotide sequence encoding a 2A peptide and SPACER2 is a nucleotide sequence encoding GGSGG. In some embodiments, SPACER1 is a nucleotide sequence encoding GGSGG and SPACER2 is a nucleotide sequence encoding a 2A peptide. In some embodiments, the antigen construct encodes any of the immunogenic CEA polypeptides described herein above. In some embodiments, the antigen construct encodes any of the immunogenic TERT polypeptides described herein above. In some embodiments, the antigen construct encodes any of the immunogenic MUC1 polypeptides described herein above.

[0209] In some specific embodiments, the present disclosure provides a multi-antigen construct of a formula selected from the group consisting of:

(1) MUC1-2A-CEA-2A-TERT (IV)

(2) MUC1-2A-TERT-2A-CEA (V)

(3) CEA-2A-MUC1-2A-TERT (VI)

(4) CEA-2A-TERT-2A-MUC1 (VII)

(5) TERT-2A-MUC1-2A-CEA (VIII)

(6) TERT-2A-CEA-2A-MUC1 (IX)

wherein in each of formulas (IV)-(IX): (i) MUC1, CEA, and TERT represent a nucleotide sequence encoding an immunogenic MUC1 polypeptide, an immunogenic CEA polypeptide, and an immunogenic TERT polypeptide, respectively; and (ii) 2A is a nucleotide sequence encoding a 2A peptide. In some embodiments, the antigen construct encodes any of the immunogenic CEA polypeptides described herein above. In some embodiments, the antigen construct encodes any of the immunogenic TERT polypeptides described herein above. In some embodiments, the antigen construct encodes any of the immunogenic MUC1 polypeptides described herein above.

[0210] The immunogenic CEA polypeptide, immunogenic MUC1 polypeptide, and immunogenic TERT polypeptide encoded by a multi-antigen construct, including dual antigen constructs and triple-antigen constructs, may be in membrane-bound form or cytoplasmic form. In some specific embodiments, the immunogenic TAA polypeptide is in cytoplasmic form.

[0211] In some embodiments, the immunogenic CEA polypeptide encoded by a multi-antigen construct comprises (1) the amino acid sequence of the N-domain and (2) the amino acid sequence of 1, 2, 3, 4, or 5 C-like domains of a human CEA protein. In some particular embodiments, the immunogenic CEA polypeptides comprise (1) the amino acid sequence of at least four C-like domains, such as A2, B2, A3, and B3, and (2) the amino acid sequence of the N-domain. In some further embodiments, the immunogenic CEA polypeptides are in cytoplasmic form (or “cCEA”) or the membrane-bound form (or “mCEA”).

[0212] In some specific embodiments, the immunogenic CEA polypeptide encoded by a multi-antigen construct comprises an amino acid sequence selected from:

[0213] (1) an amino acid sequence comprising or consisting of (i) amino acids 323-677 of SEQ ID NO:2 or (ii) amino acids 35-144 and 323-677 of SEQ ID NO:2;

[0214] (2) an amino acid sequence comprising or consisting of (i) amino acids 323-702 of SEQ ID NO:2 or (ii) amino acids 2-144 and 323-702 of SEQ ID NO:2;

[0215] (3) the amino acid sequence of SEQ ID NO:17 (amino acid sequence encoded by Plasmid 1386 (mCEA) or amino acids 4-526 of SEQ ID NO:17;

[0216] (4) the amino acid sequence of SEQ ID NO:19 (amino acid sequence encoded Plasmid 1390 (cCEA) or amino acids 4-468 of SEQ ID NO:19; or

[0217] (5) a functional variant of any of the amino acid sequences of (1)-(4) above.

[0218] In some specific embodiments, the immunogenic CEA polypeptide encoded by a multi-antigen construct consists of an amino acid sequence selected from:

[0219] (1) an amino acid sequence comprising or consisting of (i) amino acids 323-677 of SEQ ID NO:2 or (ii) amino acids 35-144 and 323-677 of SEQ ID NO:2;

[0220] (2) an amino acid sequence comprising or consisting of (i) amino acids 323-702 of SEQ ID NO:2 or (ii) amino acids 2-144 and 323-702 of SEQ ID NO:2;

[0221] (3) the amino acid sequence of SEQ ID NO:17 (amino acid sequence encoded by Plasmid 1386 (mCEA) or amino acids 4-526 of SEQ ID NO:17;

[0222] (4) the amino acid sequence of SEQ ID NO:19 (amino acid sequence encoded Plasmid 1390 (cCEA) or amino acids 4-468 of SEQ ID NO:19; or

[0223] (5) a functional variant of any of the amino acid sequences of (1)-(4) above.

[0224] In some particular embodiments, the multi-antigen construct is a DNA and comprises (1) the nucleotide sequence of SEQ ID NO:14, (2) the nucleotide sequence of SEQ ID NO:16, (3) the nucleotide sequence of SEQ ID NO:18, or (4) a degenerate variant of the nucleotide sequence of SEQ ID NO:14, 16, or 18. In some other particular embodiments, the multi-antigen construct is a RNA and comprises a nucleotide sequence that corresponds to: (1) the nucleotide sequence of SEQ ID NO:14; (2) the nucleotide sequence of SEQ ID NO:16; (3) the nucleotide sequence of SEQ ID NO:18; or (4) a degenerate variant of the nucleotide sequence of SEQ ID NO:14, 16, or 18.

[0225] In some embodiments, the immunogenic MUC1 polypeptide encoded by a multi-antigen construct comprises (1) an amino acid sequence of 3 to 30 tandem repeats of 20 amino acids of a human MUC1 protein and (2) the amino acid sequences of the human MUC1 protein that flank the VNTR region. In some specific embodiments, the immunogenic MUC1 polypeptide encoded by a multi-antigen construct comprises an amino acid sequence selected from the group consisting of:

[0226] (1) the amino acid sequence of SEQ ID NO:5 (Plasmid 1027 polypeptide);

[0227] (2) an amino acid sequence comprising amino acids 4-537 of SEQ ID NO:5;

[0228] (3) an amino acid sequence comprising amino acids 24-537 of SEQ ID NO:5;

[0229] (4) the amino acid sequence of SEQ ID NO:7 (Plasmid 1197 polypeptide);

[0230] (5) an amino acid sequence comprising amino acids 4-517 of SEQ ID NO:7; and

[0231] (6) an amino acid sequence comprising amino acids 4-517 of SEQ ID NO:7, with the proviso that the amino acid at position 513 is T.

[0232] In some embodiments, the immunogenic MUC1 polypeptide encoded by a multi-antigen construct consists of (1) an amino acid sequence of 3 to 30 tandem repeats of 20 amino acids of a human MUC1 protein and (2) the amino acid sequences of the human MUC1 protein that flank the VNTR region. In some specific embodiments, the immunogenic MUC1 polypeptide encoded by a multi-antigen construct consists of an amino acid sequence selected from the group consisting of:

[0233] (1) the amino acid sequence of SEQ ID NO:5 (Plasmid 1027 polypeptide);

[0234] (2) an amino acid sequence comprising amino acids 4-537 of SEQ ID NO:5;

[0235] (3) an amino acid sequence comprising amino acids 24-537 of SEQ ID NO:5;

[0236] (4) the amino acid sequence of SEQ ID NO:7 (Plasmid 1197 polypeptide);

[0237] (5) an amino acid sequence comprising amino acids 4-517 of SEQ ID NO:7; and

[0238] (6) an amino acid sequence comprising amino acids 4-517 of SEQ ID NO:7, with the proviso that the amino acid at position 513 is T.

[0239] In some specific embodiments, the immunogenic MUC1 polypeptide encoded by a multi-antigen construct consists of an amino acid sequence selected from the group consisting of:

[0240] (1) an amino acid sequence consisting of amino acids 4-537 of SEQ ID NO:5;

[0241] (2) an amino acid sequence consisting of amino acids 24-537 of SEQ ID NO:5;

[0242] (3) an amino acid sequence consisting of amino acids 4-517 of SEQ ID NO:7;

[0243] and

[0244] (4) an amino acid sequence consisting of amino acids 4-517 of SEQ ID NO:7, with the proviso that the amino acid at position 513 is T.

[0245] In some particular embodiments, the multi-antigen construct is a DNA and comprises: (1) the nucleotide sequence of SEQ ID NO:4 or a nucleotide sequence comprising nucleotides 10-1611 of SEQ ID NO:4; (2) the nucleotide sequence of SEQ ID NO:6 or a nucleotide sequence comprising nucleotides 10-1551 of SEQ ID NO:6; or (3) a degenerate variant of the nucleotide sequence of SEQ ID NO:4 or SEQ ID NO:6.

[0246] In some other particular embodiments, the multi-antigen construct is a RNA and comprises a nucleotide sequence that corresponds to (1) the nucleotide sequence of SEQ ID NO:4, (2) the nucleotide sequence of SEQ ID NO:6, or (3) a degenerate variant of the nucleotide sequence of SEQ ID NO:4 or SEQ ID NO:6.

[0247] The immunogenic TERT polypeptide encoded by a multi-antigen construct may be the full length TERT protein or any truncated or mutated form of the TERT protein. The full length TERT protein is expected to generate stronger immune responses than a truncated form. However, depending on the specific vector chosen to deliver the construct, the vector may not have the capacity to carry the gene encoding the full TERT protein. Therefore, deletions of some amino acids from the protein may be made such that the transgenes would fit into a particular vector. The deletions of amino acids can be made from the N-terminus, C-terminus, or anywhere in the sequence of the TERT protein (e.g. from the TERT protein of SEQ ID NO:3). Additional deletions may be made in order to remove the nuclear localization signal, thereby rendering the polypeptides cytoplasmic, increasing access to cellular antigen processing/presentation machinery. In some embodiments, the amino acids up to position 200, 300, 400, 500, or 600 of the N-terminus of the TERT protein are absent from the immunogenic TERT polypeptides (e.g. from the TERT protein of SEQ ID NO:3).

[0248] In some specific embodiments, amino acids 1-343 (TERT343), 1-240 (TERT240), or 1-541 (TERT541) of the N-terminus of the TERT protein of SEQ ID NO:3 are absent. Thus, in an embodiment, the amino acid sequence of the immunogenic TERT polypeptide encoded by a multi-antigen construct of the invention is any of the following:

[0249] (1) an amino acid sequence comprising amino acids 51-1132 of SEQ ID NO:3 and lacking amino acids 1 to 50 of SEQ ID NO:3;

[0250] (2) an amino acid sequence comprising amino acids 101-1132 of SEQ ID NO:3 and lacking amino acids 1 to 100 of SEQ ID NO:3;

[0251] (3) an amino acid sequence comprising amino acids 151-1132 of SEQ ID NO:3 and lacking amino acids 1 to 150 of SEQ ID NO:3;

[0252] (4) an amino acid sequence comprising amino acids 201-1132 of SEQ ID NO:3 and lacking amino acids 1 to 200 of SEQ ID NO:3;

[0253] (5) an amino acid sequence comprising amino acids 241-1132 of SEQ ID NO:3 and lacking amino acids 1 to 240 of SEQ ID NO:3;

[0254] (6) an amino acid sequence comprising amino acids 301-1132 of SEQ ID NO:3 and lacking amino acids 1 to 300 of SEQ ID NO:3;

[0255] (7) an amino acid sequence comprising amino acids 351-1132 of SEQ ID NO:3 and lacking amino acids 1 to 350 of SEQ ID NO:3;

[0256] (8) an amino acid sequence comprising amino acids 401-1132 of SEQ ID NO:3 and lacking amino acids 1 to 400 of SEQ ID NO:3;

[0257] (9) an amino acid sequence comprising amino acids 451-1132 of SEQ ID NO:3 and lacking amino acids 1 to 450 of SEQ ID NO:3;

[0258] (10) an amino acid sequence comprising amino acids 501-1132 of SEQ ID NO:3 and lacking amino acids 1 to 500 of SEQ ID NO:3;

[0259] (11) an amino acid sequence comprising amino acids 551-1132 of SEQ ID NO:3 and lacking amino acids 1 to 550 of SEQ ID NO:3; or

[0260] (12) an amino acid sequence comprising amino acids 601-1132 of SEQ ID NO:3 and lacking amino acids 1-600 of SEQ ID NO:3.

[0261] In an embodiment, the amino acid sequence of the immunogenic TERT polypeptide encoded by a multi-antigen construct of the invention is any of the following:

[0262] (1) an amino acid sequence consisting of amino acids 51-1132, 101-1132, 151-1132, 201-1132, 251-1132, 301-1132, 351-1132, 401-1132, 451-1132, 501-1132, or 551-1132 of SEQ ID NO:3;

[0263] (2) an amino acid sequence consisting of amino acids 601-1132 of SEQ ID NO:3;

[0264] (3) an amino acid sequence consisting of amino acids 542-1132 of SEQ ID NO:3;

[0265] (4) an amino acid sequence consisting of amino acids 344-1132 of SEQ ID NO:3; and

[0266] (5) an amino acid sequence consisting of amino acids 241-1132 of SEQ ID NO:3.

[0267] Mutations of additional amino acids may be introduced in order to inactivate the TERT catalytic domain. Examples of such mutations include substitution of aspartic acid at position 712 of SEQ ID NO:3, such as D712A, and substitution of valine at position 713 of SEQ ID NO:3, such as V713I. Therefore, in an embodiment, the immunogenic TERT polypeptide encoded by a multi-antigen construct consists of any of the above disclosed TERT polypeptides wherein a substitution at position corresponding to aspartic acid 712 of SEQ ID NO:3 and/or substitution at position corresponding to valine 713 of SEQ ID NO:3 and wherein said mutation(s) inactivates the TERT catalytic domain. In an embodiment said mutation consists of a substitution of aspartic acid at position corresponding to position 712 of SEQ ID NO:3 and substitution of valine at position corresponding to position 713 of SEQ ID NO:3 wherein said mutation(s) inactivate the TERT catalytic domain. In an embodiment said mutation consists of a substitution of aspartic acid with alanine at position corresponding to position 712 of SEQ ID NO:3 (D712A) and a substitution of valine with isoleucine at position corresponding to position 713 of SEQ ID NO:3 (V713I).

[0268] In some specific embodiments, the immunogenic TERT polypeptide encoded by a multi-antigen construct comprises an amino acid sequence selected from the group consisting of:

[0269] (1) the amino acid sequence of SEQ ID NO:9 (Plasmid 1112 Polypeptide) or an amino acid sequence comprising amino acids 2-893 of SEQ ID NO:9;

[0270] (2) the amino acid sequence of SEQ ID NO:11 (Plasmid 1326 Polypeptide) or an amino acid sequence comprising amino acids 4-791 of SEQ ID NO:11;

[0271] (3) the amino acid sequence of SEQ ID NO:13 (Plasmid 1330 Polypeptide) or an amino acid sequence comprising amino acids 4-594 of SEQ ID NO:13; or

[0272] (4) an amino acid sequence that is a functional variant of any of the amino acid sequences (1)-(3) above.

[0273] In some specific embodiments, the immunogenic TERT polypeptide encoded by a multi-antigen construct consists of an amino acid sequence selected from the group consisting of:

[0274] (1) the amino acid sequence of SEQ ID NO:9 (Plasmid 1112 Polypeptide) or an amino acid sequence comprising amino acids 2-893 of SEQ ID NO:9;

[0275] (2) the amino acid sequence of SEQ ID NO:11 (Plasmid 1326 Polypeptide) or an amino acid sequence comprising amino acids 4-791 of SEQ ID NO:11;

[0276] (3) the amino acid sequence of SEQ ID NO:13 (Plasmid 1330 Polypeptide) or an amino acid sequence comprising amino acids 4-594 of SEQ ID NO:13; or

[0277] (4) an amino acid sequence that is a functional variant of any of the amino acid sequences (1)-(3) above.

[0278] In some specific embodiments, the immunogenic TERT polypeptide encoded by a multi-antigen construct consists of an amino acid sequence selected from the group consisting of:

[0279] (1) an amino acid sequence consisting of amino acids 2-893 of SEQ ID NO:9;

[0280] (2) an amino acid sequence consisting of amino acids 4-791 of SEQ ID NO:11;

[0281] (3) an amino acid sequence consisting of amino acids 4-594 of SEQ ID NO:13; or

[0282] (4) an amino acid sequence that is a functional variant of any of the amino acid sequences (1)-(3) above.

[0283] In some particular embodiments, the multi-antigen construct is a DNA and comprises: (1) the nucleotide sequence of SEQ ID NO:8 or a nucleotide sequence comprising nucleotides 4-2673 of SEQ ID NO:8; (2) the nucleotide sequence of SEQ ID NO:10 or a nucleotide sequence comprising nucleotides 10-2373 of SEQ ID NO:10; (3) the nucleotide sequence of SEQ ID NO:12 or a nucleotide sequence comprising nucleotides 10-1782 of SEQ ID NO:12; or (4) a degenerate variant of the nucleotide sequence of SEQ ID NO:8, SEQ ID NO:10, or SEQ ID NO:12.

[0284] In some other particular embodiments, the multi-antigen construct is a RNA and comprises a nucleotide sequence that corresponds to (1) the nucleotide sequence of SEQ ID NO:8, (2) the nucleotide sequence of SEQ ID NO:10, (3) the nucleotide sequence of SEQ ID NO:12, or (4) a degenerate variant of the nucleotide sequence of SEQ ID NO:8, 10, or 12.

[0285] In some particular embodiments, the present disclosure provides a multi-antigen construct that comprises (i) at least one nucleotide sequence encoding an immunogenic CEA polypeptide and (ii) at least one nucleotide sequence encoding either an immunogenic MUC1 polypeptide or an immunogenic TERT polypeptide, wherein the multi-antigen construct encodes an amino acid sequence comprising:

[0286] (1) the amino acid sequence of SEQ ID NO:31 or amino acids 4-1088 of SEQ ID NO:31;

[0287] (2) the amino acid sequence of SEQ ID NO:33 or amino acids 4-1081 of SEQ ID NO:33;

[0288] (3) the amino acid sequence of SEQ ID NO:35 or amino acids 4-1085 of SEQ ID NO:35;

[0289] (4) the amino acid sequence of SEQ ID NO:37 or amino acids 4-1030 of SEQ ID NO:37;

[0290] (5) the amino acid sequence of SEQ ID NO:39 or amino acids 4-1381 of SEQ ID NO:39; or

[0291] (6) the amino acid sequence of SEQ ID NO:41 or amino acids 4-1441 of SEQ ID NO:41.

[0292] In some particular embodiments, the present disclosure provides a multi-antigen construct that comprises (i) at least one nucleotide sequence encoding an immunogenic CEA polypeptide and (ii) at least one nucleotide sequence encoding either an immunogenic MUC1 polypeptide or an immunogenic TERT polypeptide, wherein the multi-antigen construct encodes an amino acid sequence consisting of:

[0293] (1) the amino acid sequence of SEQ ID NO:31 or amino acids 4-1088 of SEQ ID NO:31;

[0294] (2) the amino acid sequence of SEQ ID NO:33 or amino acids 4-1081 of SEQ ID NO:33;

[0295] (3) the amino acid sequence of SEQ ID NO:35 or amino acids 4-1085 of SEQ ID NO:35;

[0296] (4) the amino acid sequence of SEQ ID NO:37 or amino acids 4-1030 of SEQ ID NO:37;

[0297] (5) the amino acid sequence of SEQ ID NO:39 or amino acids 4-1381 of SEQ ID NO:39, or

[0298] (6) the amino acid sequence of SEQ ID NO:41 or amino acids 4-1441 of SEQ ID NO:41.

[0299] In some specific embodiments, the present disclosure provides a multi-antigen construct that is a DNA and comprises (i) at least one nucleotide sequence encoding an immunogenic CEA polypeptide and (ii) at least one nucleotide sequence encoding either an immunogenic MUC1 polypeptide or an immunogenic TERT polypeptide, wherein the a multi-antigen construct comprises a nucleotide sequence selected from the group consisting of:

[0300] (1) the nucleotide sequence of SEQ ID NO:30 or a nucleotide sequence comprising nucleotides 10-3264 of SEQ ID NO:30;

[0301] (2) the nucleotide sequence of SEQ ID NO:32 or a nucleotide sequence comprising nucleotides 10-3243 of SEQ ID NO:32;

[0302] (3) the nucleotide sequence of SEQ ID NO:34 or a nucleotide sequence comprising nucleotides 10-3255 of SEQ ID NO:34;

[0303] (4) the nucleotide sequence of SEQ ID NO:36 or a nucleotide sequence comprising nucleotides 10-3090 of SEQ ID NO:36;

[0304] (5) the nucleotide sequence of SEQ ID NO:38 or a nucleotide sequence comprising nucleotides 10-4143 of SEQ ID NO:38;

[0305] (6) the nucleotide sequence of SEQ ID NO:40 or a nucleotide sequence comprising nucleotides 10-4323 of SEQ ID NO:40; or

[0306] (7) a nucleotide sequence that is a degenerate variant of any of the nucleotide sequences of (1)-(6) above.

[0307] In some specific embodiments, the present disclosure provides a multi-antigen construct that is a DNA and comprises (i) at least one nucleotide sequence encoding an immunogenic CEA polypeptide and (ii) at least one nucleotide sequence encoding either an immunogenic MUC1 polypeptide or an immunogenic TERT polypeptide, wherein the a multi-antigen construct comprises a nucleotide sequence selected from the group consisting of:

[0308] (1) a nucleotide sequence consisting of nucleotides 10-3264 of SEQ ID NO:30;

[0309] (2) a nucleotide sequence consisting of nucleotides 10-3243 of SEQ ID NO:32;

[0310] (3) a nucleotide sequence consisting of nucleotides 10-3255 of SEQ ID NO:34;

[0311] (4) a nucleotide sequence consisting of nucleotides 10-3090 of SEQ ID NO:36;

[0312] (5) a nucleotide sequence consisting of nucleotides 10-4143 of SEQ ID NO:38;

[0313] (6) a nucleotide sequence consisting of nucleotides 10-4323 of SEQ ID NO:40; or

[0314] (7) a nucleotide sequence that is a degenerate variant of any of the nucleotide sequences (1)-(6) above.

[0315] In some other specific embodiments, the present disclosure provides a multi-antigen construct that is a RNA (e.g. mRNA) and comprises (i) at least one nucleotide sequence encoding an immunogenic CEA polypeptide and (ii) at least one nucleotide sequence encoding either an immunogenic MUC1 polypeptide or an immunogenic TERT polypeptide, wherein the a multi-antigen construct comprises a nucleotide sequence that corresponds to a nucleotide sequence selected from the group consisting of:

[0316] (1) the nucleotide sequence of SEQ ID NO:30 or a nucleotide sequence comprising nucleotides 10-3264 of SEQ ID NO:30;

[0317] (2) the nucleotide sequence of SEQ ID NO:32 or a nucleotide sequence comprising nucleotides 10-3243 of SEQ ID NO:32;

[0318] (3) the nucleotide sequence of SEQ ID NO:34 or a nucleotide sequence comprising nucleotides 10-3255 of SEQ ID NO:34;

[0319] (4) the nucleotide sequence of SEQ ID NO:36 or a nucleotide sequence comprising nucleotides 10-3090 of SEQ ID NO:36;

[0320] (5) the nucleotide sequence of SEQ ID NO:38 or a nucleotide sequence comprising nucleotides 10-4143 of SEQ ID NO:38;

[0321] (6) the nucleotide sequence of SEQ ID NO:40 or a nucleotide sequence comprising nucleotides 10-4323 of SEQ ID NO:40; or

[0322] (7) a nucleotide sequence that is a degenerate variant of any of the nucleotide sequences (1)-(6) above.

[0323] In some other specific embodiments, the present disclosure provides a multi-antigen construct that is a RNA (e.g. mRNA) and comprises (i) at least one nucleotide sequence encoding an immunogenic CEA polypeptide and (ii) at least one nucleotide sequence encoding either an immunogenic MUC1 polypeptide or an immunogenic TERT polypeptide, wherein the a multi-antigen construct comprises a nucleotide sequence that corresponds to a nucleotide sequence selected from the group consisting of:

[0324] (1) a nucleotide sequence consisting of nucleotides 10-3264 of SEQ ID NO:30;

[0325] (2) a nucleotide sequence consisting of nucleotides 10-3243 of SEQ ID NO:32;

[0326] (3) a nucleotide sequence consisting of nucleotides 10-3255 of SEQ ID NO:34;

[0327] (4) a nucleotide sequence consisting of nucleotides 10-3090 of SEQ ID NO:36;

[0328] (5) a nucleotide sequence consisting of nucleotides 10-4143 of SEQ ID NO:38;

[0329] (6) a nucleotide sequence consisting of nucleotides 10-4323 of SEQ ID NO:40; or

[0330] (7) a nucleotide sequence that is a degenerate variant of any of the nucleotide sequences (1)-(6) above.

[0331] In some other embodiments, the present disclosure provides a multi-antigen construct that comprises (1) at least one nucleotide sequence encoding an immunogenic CEA polypeptide, (2) at least one nucleotide sequence encoding an immunogenic MUC1 polypeptide, and (3) at least one nucleotide sequence encoding an immunogenic TERT polypeptide, wherein the multi-antigen construct comprises a nucleotide sequence encoding an amino acid sequence selected from the group consisting of:

[0332] (1) the amino acid sequence of SEQ ID NO:43 or an amino acid sequence comprising amino acids 4-2003 of SEQ ID NO:43;

[0333] (2) the amino acid sequence of SEQ ID NO:45 or an amino acid sequence comprising amino acids 4-2001 of SEQ ID NO:45;

[0334] (3) the amino acid sequence of SEQ ID NO:47 or an amino acid sequence comprising amino acids 4-2008 of SEQ ID NO:47;

[0335] (4) the amino acid sequence of SEQ ID NO:49 or an amino acid sequence comprising amino acids 4-1996 of SEQ ID NO: 49;

[0336] (5) the amino acid sequence of SEQ ID NO:51 or an amino acid sequence comprising amino acids 4-1943 of SEQ ID NO:51;

[0337] (6) the amino acid sequence of SEQ ID NO:53 or an amino acid sequence comprising amino acids 4-1943 of SEQ ID NO:53; or

[0338] (7) a functional variant of any of the amino acid sequences (1)-(6) above.

[0339] In some other embodiments, the present disclosure provides a multi-antigen construct that comprises (1) at least one nucleotide sequence encoding an immunogenic CEA polypeptide, (2) at least one nucleotide sequence encoding an immunogenic MUC1 polypeptide, and (3) at least one nucleotide sequence encoding an immunogenic TERT polypeptide, wherein the multi-antigen construct comprises a nucleotide sequence encoding an amino acid sequence selected from the group consisting of:

[0340] (1) an amino acid sequence consisting of amino acids 4-2003 of SEQ ID NO:43;

[0341] (2) an amino acid sequence consisting of amino acids 4-2001 of SEQ ID NO:45;

[0342] (3) an amino acid sequence consisting of amino acids 4-2008 of SEQ ID NO:47;

[0343] (4) an amino acid sequence consisting of amino acids 4-1996 of SEQ ID NO: 49;

[0344] (5) an amino acid sequence consisting of amino acids 4-1943 of SEQ ID NO:51;

[0345] or

[0346] (6) an amino acid sequence consisting of amino acids 4-1943 of SEQ ID NO:53.

[0347] In some particular embodiments, the present disclosure provides a multi-antigen construct that comprises (1) at least one nucleotide sequence encoding an immunogenic CEA polypeptide, (2) at least one nucleotide sequence encoding an immunogenic MUC1 polypeptide, and (3) at least one nucleotide sequence encoding an immunogenic TERT polypeptide, wherein the multi-antigen construct is a DNA and comprises a nucleotide sequence selected from the group consisting of:

[0348] (1) the nucleotide sequence of SEQ ID NO:42 or a nucleotide sequence comprising nucleotides 10-6009 of SEQ ID NO:42;

[0349] (2) the nucleotide sequence of SEQ ID NO:44 or a nucleotide sequence comprising nucleotides 10-6003 of SEQ ID NO:44;

[0350] (3) the nucleotide sequence of SEQ ID NO:46 or a nucleotide sequence comprising nucleotides 10-6024 of SEQ ID NO:46;

[0351] (4) the nucleotide sequence of SEQ ID NO:48 or a nucleotide sequence comprising nucleotides 10-5988 of SEQ ID NO:48;

[0352] (5) the nucleotide sequence of SEQ ID NO:50 or a nucleotide sequence comprising nucleotides 10-5829 of SEQ ID NO:50;

[0353] (6) the nucleotide sequence of SEQ ID NO:52 or a nucleotide sequence comprising nucleotides 10-5829 of SEQ ID NO:52; and

[0354] (7) a nucleotide sequence that is a degenerate variant of any of the nucleotide sequences (1)-(6) above.

[0355] In some particular embodiments, the present disclosure provides a multi-antigen construct that comprises (1) at least one nucleotide sequence encoding an immunogenic CEA polypeptide, (2) at least one nucleotide sequence encoding an immunogenic MUC1 polypeptide, and (3) at least one nucleotide sequence encoding an immunogenic TERT polypeptide, wherein the multi-antigen construct is a DNA and comprises a nucleotide sequence selected from the group consisting of:

[0356] (1) a nucleotide sequence consisting of nucleotides 10-6009 of SEQ ID NO:42;

[0357] (2) a nucleotide sequence consisting of nucleotides 10-6003 of SEQ ID NO:44;

[0358] (3) a nucleotide sequence consisting of nucleotides 10-6024 of SEQ ID NO:46;

[0359] (4) a nucleotide sequence consisting of nucleotides 10-5988 of SEQ ID NO:48;

[0360] (5) a nucleotide sequence consisting of nucleotides 10-5829 of SEQ ID NO:50;

[0361] (6) a nucleotide sequence consisting of nucleotides 10-5829 of SEQ ID NO:52; and

[0362] (7) a nucleotide sequence that is a degenerate variant of any of the nucleotide sequences (1)-(6) above.

[0363] In some other particular embodiments, the present disclosure provides a multi-antigen construct, wherein the multi-antigen construct is a RNA (e.g. mRNA) and comprises a nucleotide sequence that corresponds to a nucleotide sequence selected from the group consisting of:

[0364] (1) the nucleotide sequence of SEQ ID NO:42 or a nucleotide sequence comprising nucleotides 10-6009 of SEQ ID NO:42;

[0365] (2) the nucleotide sequence of SEQ ID NO:44 or a nucleotide sequence comprising nucleotides 10-6003 of SEQ ID NO:44;

[0366] (3) the nucleotide sequence of SEQ ID NO:46 or a nucleotide sequence comprising nucleotides 10-6024 of SEQ ID NO:46;

[0367] (4) the nucleotide sequence of SEQ ID NO:48 or a nucleotide sequence comprising nucleotides 10-5988 of SEQ ID NO:48;

[0368] (5) the nucleotide sequence of SEQ ID NO:50 or a nucleotide sequence comprising nucleotides 10-5829 of SEQ ID NO:50;

[0369] (6) the nucleotide sequence of SEQ ID NO:52 or a nucleotide sequence comprising nucleotides 10-5829 of SEQ ID NO:52; and

[0370] (7) a nucleotide sequence that is a degenerate variant of any of the nucleotide sequences (1)-(6) above.

[0371] In some other particular embodiments, the present disclosure provides a multi-antigen construct, wherein the multi-antigen construct is a RNA (e.g. mRNA) and comprises a nucleotide sequence that corresponds to a nucleotide sequence selected from the group consisting of:

[0372] (1) a nucleotide sequence consisting of nucleotides 10-6009 of SEQ ID NO:42;

[0373] (2) a nucleotide sequence consisting of nucleotides 10-6003 of SEQ ID NO:44;

[0374] (3) a nucleotide sequence consisting of nucleotides 10-6024 of SEQ ID NO:46;

[0375] (4) a nucleotide sequence consisting of nucleotides 10-5988 of SEQ ID NO:48;

[0376] (5) a nucleotide sequence consisting of nucleotides 10-5829 of SEQ ID NO:50;

[0377] (6) a nucleotide sequence consisting of nucleotides 10-5829 of SEQ ID NO:52; and

[0378] (7) a nucleotide sequence that is a degenerate variant of any of the nucleotide sequences (1)-(6) above.

[0379] In still other particular embodiments, the present disclosure provides a multi-antigen construct comprising (1) at least one nucleotide sequence encoding an immunogenic CEA polypeptide, (2) at least one nucleotide sequence encoding an immunogenic MUC1 polypeptide, and (3) at least one nucleotide sequence encoding an immunogenic TERT polypeptide, wherein the multi-antigen construct is an RNA (e.g. mRNA) and comprises a nucleotide sequence selected from the group consisting of:

[0380] (1) the nucleotide sequence of SEQ ID NO:87;

[0381] (2) the nucleotide sequence of SEQ ID NO:88;

[0382] (3) the nucleotide sequence of SEQ ID NO:89;

[0383] (4) the nucleotide sequence of SEQ ID NO:90;

[0384] (5) the nucleotide sequence of SEQ ID NO:91;

[0385] (6) the nucleotide sequence of SEQ ID NO:92; and

[0386] (7) a degenerate variant of any of the nucleotide sequence of SEQ ID NO:87, SEQ ID NO:88, SEQ ID NO:89, SEQ ID NO:90, SEQ ID NO:91, or SEQ ID NO:92.

[0387] In still other particular embodiments, the present disclosure provides a multi-antigen construct comprising (1) at least one nucleotide sequence encoding an immunogenic CEA polypeptide, (2) at least one nucleotide sequence encoding an immunogenic MUC1 polypeptide, and (3) at least one nucleotide sequence encoding an immunogenic TERT polypeptide, wherein the multi-antigen construct is an RNA (e.g. mRNA) and consists of a nucleotide sequence selected from the group consisting of:

[0388] (1) the nucleotide sequence of SEQ ID NO:87;

[0389] (2) the nucleotide sequence of SEQ ID NO:88;

[0390] (3) the nucleotide sequence of SEQ ID NO:89;

[0391] (4) the nucleotide sequence of SEQ ID NO:90;

[0392] (5) the nucleotide sequence of SEQ ID NO:91;

[0393] (6) the nucleotide sequence of SEQ ID NO:92; and

[0394] (7) a degenerate variant of any of the nucleotide sequence of SEQ ID NO:87, SEQ ID NO:88, SEQ ID NO:89, SEQ ID NO:90, SEQ ID NO:91, or SEQ ID NO:92.

### D. Vectors Containing an Antigen Construct

[0395] Another aspect of the invention relates to vectors containing one or more of any of the antigen constructs provided by the present disclosure, including single antigen constructs, dual-antigen constructs, triple-antigen constructs, and other multi-antigen constructs. The vectors are useful for cloning or expressing the immunogenic TAA polypeptides encoded by the antigen constructs, or for delivering the antigen construct in a composition, such as a vaccine, to a host cell or to a host animal, such as a human.

[0396] A wide variety of vectors may be prepared to contain and express an antigen construct provided by the present disclosure, such as plasmid vectors, cosmid vectors, phage vectors, and viral vectors. In addition to the transgene insert sequence (i.e., the single-antigen construct or multi-antigen constructs provided by the present disclosure), which is also referred to as open reading frame (ORF), the structure of a vector typically comprises other components or elements that enable or facilitate the expression, such as origin of replication, multi-cloning site, and a selectable marker.

[0397] In some embodiments, the disclosure provides a plasmid vector containing an antigen construct provided by the present disclosure. Examples of suitable plasmid vectors include pBR325, pUC18, pSKF, pET23D, and pGB-2. Other examples of plasmid vectors, as well as method of constructing such vectors, are described in U.S. Pat. Nos. 5,589,466, 5,688,688, and 5,814,482. Construction of specific exemplary plasmid vectors comprising a single-antigen construct, dual-antigen construct, or triple-antigen construct is also described in the present disclosure.

[0398] In some specific embodiments, the disclosure provides a plasmid vector comprising a nucleotide sequence of any of SEQ ID NOs:54, 55, 56, 57, 59, 61, 63, 65, 67, 69, 70, 71, 72, 73, and 74.

[0399] In other embodiments, the present invention provides vectors that are constructed from viruses (i.e., viral vectors), including DNA viruses and RNA viruses (retroviruses). Examples of DNA viruses that may be used to construct a vector include herpes simplex virus, parvovirus, vaccinia virus, and adenoviruses. Examples of RNA viruses that may be used to construct a vector include alphavirus, flavivirus, pestivirus, influenzavirus, lyssavirus, and vesiculovirus. Construction of vectors from various viruses is known in the art. Examples of retroviral vectors are described in U.S. Pat. Nos. 5,716,613, 5,716,832, and 5,817,491. Examples of vectors that can be generated from alphaviruses are described in U.S. Pat. Nos. 5,091,309, 5,843,723, and 5,789,245. Examples of other vectors include: (1) pox viruses, such as canary pox virus or vaccinia virus (U.S. Pat. Nos. 4,603,112, 4,769,330 and 5,017,487; WO 89/01973); (2) SV40 (Mulligan et al., Nature 277:108-114, 1979); (3) herpes (Kit, Adv. Exp. Med. Biol. 215:219-236, 1989; U.S. Pat. No. 5,288,641); and (4) lentivirus such as HIV (Poznansky, J. Virol. 65:532-536, 1991).

[0400] In some particular embodiments, the present disclosure provides adenoviral vectors derived from non-human primate adenoviruses, such as simian adenoviruses. Examples of such adenoviral vectors, as well as their preparation, are described in PCT application publications WO2005/071093 and WO2010/086189, and include non-replicating vectors constructed from simian adenoviruses, such as ChAd3, ChAd4, ChAdS, ChAd7, ChAd8, ChAd9, ChAd10, ChAd11, ChAd16, ChAd17, ChAd19, ChAd20, ChAd22, ChAd24, ChAd26, ChAd30, ChAd31, ChAd37, ChAd38, ChAd44, ChAd63, ChAd68, ChAd82, ChAd55, ChAd73, ChAd83, ChAd146, ChAd147, PanAd1, Pan Ad2, and Pan Ad3, and replication-competent vectors constructed from adenoviruses Ad4 or Ad7. It is preferred that in constructing the adenoviral vectors from the simian adenoviruses one or more of the early genes from the genomic region of the virus selected from E1A, E1B, E2A, E2B, E3, and E4 are either deleted or rendered non-functional by deletion or mutation. In a particular embodiment, the vector is constructed from ChAd68. The chimpanzee adenovirus ChAd68 is also referred to in the literature as simian adenovirus 25, C68, AdC68, Chad68, SAdV25, PanAd9, or Pan9. A method of constructing vectors from ChAd68 for expressing multi-antigen constructs is described in international patent application publication WO2015/063647. Expression vectors typically include one or more control elements that are operatively linked to the nucleic acid sequence to be expressed. The term “control elements” refers collectively to promoter regions, polyadenylation signals, transcription termination sequences, upstream regulatory domains, origins of replication, internal ribosome entry sites (“IRES”), enhancers, and the like, which collectively provide for the replication, transcription, and translation of a coding sequence in a recipient cell. Not all of these control elements need always be present so long as the selected coding sequence is capable of being replicated, transcribed, and translated in an appropriate host cell. The control elements are selected based on a number of factors known to those skilled in that art, such as the specific host cells and source or structures of other vector components. For enhancing the expression of an immunogenic TAA polypeptide, a Kozak sequence can be provided upstream of the sequence encoding the immunogenic TAA polypeptide. For vertebrates, a known Kozak sequence is (GCC)NCCATGG, wherein N is A or G and GCC is less conserved. Exemplary Kozak sequences that can be used include GAACATGG, ACCAUGG and ACCATGG.

[0401] In some embodiments, the vector comprises a multi-antigen construct encoding (i) at least one immunogenic CEA polypeptide and (ii) at least one immunogenic MUC1 polypeptide or at least one immunogenic TERT polypeptide. The vector may be a DNA plasmid vector, DNA virus vector, RNA plasmid vector, or RNA virus vector. In some specific embodiments, the vector comprises a multi-antigen construct which encodes an amino acid sequence comprising:

[0402] (1) the amino acid sequence of SEQ ID NO:31 or amino acids 4-1088 of SEQ ID NO:31;

[0403] (2) the amino acid sequence of SEQ ID NO:33 or amino acids 4-1081 of SEQ ID NO:33;

[0404] (3) the amino acid sequence of SEQ ID NO:35 or amino acids 4-1085 of SEQ ID NO:35;

[0405] (4) the amino acid sequence of SEQ ID NO:37 or amino acids 4-1030 of SEQ ID NO:37;

[0406] (5) the amino acid sequence of SEQ ID NO:39 or amino acids 4-1381 of SEQ ID NO:39;

[0407] (6) the amino acid sequence of SEQ ID NO:41 or amino acids 4-1441 of SEQ ID NO:41; or

[0408] (7) a functional variant of any of the amino acid sequences (1)-(6) above.

[0409] In some other specific embodiments, the vector is a DNA vector and comprises a multi-antigen construct comprising a nucleotide sequence selected from the group consisting of:

[0410] (1) the nucleotide sequence of SEQ ID NO:30 or a nucleotide sequence comprising nucleotides 10-3264 of SEQ ID NO:30;

[0411] (2) the nucleotide sequence of SEQ ID NO:32 or a nucleotide sequence comprising nucleotides 10-3243 of SEQ ID NO:32;

[0412] (3) the nucleotide sequence of SEQ ID NO:34 or a nucleotide sequence comprising nucleotides 10-3255 of SEQ ID NO:34;

[0413] (4) the nucleotide sequence of SEQ ID NO:36 or a nucleotide sequence comprising nucleotides 10-3090 of SEQ ID NO:36;

[0414] (5) the nucleotide sequence of SEQ ID NO:38 or a nucleotide sequence comprising nucleotides 10-4143 of SEQ ID NO:38;

[0415] (6) the nucleotide sequence of SEQ ID NO:40 or a nucleotide sequence comprising nucleotides 10-4323 of SEQ ID NO:40; and

[0416] (7) a nucleotide sequences that is a degenerate variant of any of the nucleotide sequences of (1)-(6) above.

[0417] In some other specific embodiments, the present disclosure provides a RNA vector, which comprises a nucleotide sequence that corresponds to a nucleotide sequence selected from the group consisting of:

[0418] (1) the nucleotide sequence of SEQ ID NO:30 or a nucleotide sequence comprising nucleotides 10-3264 of SEQ ID NO:30;

[0419] (2) the nucleotide sequence of SEQ ID NO:32 or a nucleotide sequence comprising nucleotides 10-3243 of SEQ ID NO:32;

[0420] (3) the nucleotide sequence of SEQ ID NO:34 or a nucleotide sequence comprising nucleotides 10-3255 of SEQ ID NO:34;

[0421] (4) the nucleotide sequence of SEQ ID NO:36 or a nucleotide sequence comprising nucleotides 10-3090 of SEQ ID NO:36;

[0422] (5) the nucleotide sequence of SEQ ID NO:38 or a nucleotide sequence comprising nucleotides 10-4143 of SEQ ID NO:38;

[0423] (6) the nucleotide sequence of SEQ ID NO:40 or a nucleotide sequence comprising nucleotides 10-4323 of SEQ ID NO:40; and

[0424] (7) a nucleotide sequence that is a degenerate variant of any of the nucleotide sequences of (1)-(6) above.

[0425] In some other embodiments, the vector contains a multi-antigen construct encoding (i) at least one immunogenic MUC1 polypeptide, (ii) at least one immunogenic CEA polypeptide, and (iii) at least one immunogenic TERT polypeptide. The vector may be a DNA plasmid vector, DNA virus vector, RNA plasmid vector, or RNA virus vector. In some specific embodiments, the vector comprises a multi-antigen construct which encodes an amino acid sequence selected from the group consisting of:

[0426] (1) the amino acid sequence of SEQ ID NO:43 or an amino acid sequence comprising amino acids 4-2003 of SEQ ID NO:43;

[0427] (2) the amino acid sequence of SEQ ID NO:45 or an amino acid sequence comprising amino acids 4-2001 of SEQ ID NO:45;

[0428] (3) the amino acid sequence of SEQ ID NO:47 or an amino acid sequence comprising amino acids 4-2008 of SEQ ID NO:47;

[0429] (4) the amino acid sequence of SEQ ID NO:49 or an amino acid sequence comprising amino acids 4-1996 of SEQ ID NO: 49;

[0430] (5) the amino acid sequence of SEQ ID NO:51 or an amino acid sequence comprising amino acids 4-1943 of SEQ ID NO:51;

[0431] (6) the amino acid sequence of SEQ ID NO:53 or an amino acid sequence comprising amino acids 4-1943 of SEQ ID NO:53; or

[0432] (7) a functional variant of any of the amino acid sequences of (1)-(6) above.

[0433] In some other specific embodiments, the present disclosure provides a DNA vector, which comprises a multi-antigen construct comprising a nucleotide sequence selected from the group consisting of:

[0434] (1) the nucleotide sequence of SEQ ID NO:42 or a nucleotide sequence comprising nucleotides 10-6009 of SEQ ID NO:42;

[0435] (2) the nucleotide sequence of SEQ ID NO:44 or a nucleotide sequence comprising nucleotides 10-6003 of SEQ ID NO:44;

[0436] (3) the nucleotide sequence of SEQ ID NO:46 or a nucleotide sequence comprising nucleotides 10-6024 of SEQ ID NO:46;

[0437] (4) the nucleotide sequence of SEQ ID NO:48 or a nucleotide sequence comprising nucleotides 10-5988 of SEQ ID NO:48;

[0438] (5) the nucleotide sequence of SEQ ID NO:50 or a nucleotide sequence comprising nucleotides 10-5829 of SEQ ID NO:50; or

[0439] (6) the nucleotide sequence of SEQ ID NO:52 or a nucleotide sequence comprising nucleotides 10-5829 of SEQ ID NO:52; and

[0440] (7) a nucleotide sequence that is a degenerate variant of any of the nucleotide sequences of (1)-(6) above.

[0441] In some other specific embodiments, the present disclosure provides a RNA vector, which comprises a nucleotide sequence that corresponds to a nucleotide sequence selected from the group consisting of:

[0442] (1) the nucleotide sequence of SEQ ID NO:42 or a nucleotide sequence comprising nucleotides 10-6009 of SEQ ID NO:42;

[0443] (2) the nucleotide sequence of SEQ ID NO:44 or a nucleotide sequence comprising nucleotides 10-6003 of SEQ ID NO:44;

[0444] (3) the nucleotide sequence of SEQ ID NO:46 or a nucleotide sequence comprising nucleotides 10-6024 of SEQ ID NO:46;

[0445] (4) the nucleotide sequence of SEQ ID NO:48 or a nucleotide sequence comprising nucleotides 10-5988 of SEQ ID NO:48;

[0446] (5) the nucleotide sequence of SEQ ID NO:50 or a nucleotide sequence comprising nucleotides 10-5829 of SEQ ID NO:50;

[0447] (6) the nucleotide sequence of SEQ ID NO:52 or a nucleotide sequence comprising nucleotides 10-5829 of SEQ ID NO:52; and

[0448] (7) a nucleotide sequence that is a degenerate variant of any of the nucleotide sequences of (1)-(6) above.

[0449] In some specific embodiments, the present disclosure provides a DNA viral vector comprising a nucleotide sequence of any of SEQ ID NOs:58, 60, 62, 64, 66, and 68. In some other specific embodiments, the present disclosure provides a DNA plasmid vector comprising the a nucleotide sequence of any of SEQ ID NOs:57, 59, 61, 63, 65, 67, 69, 70, 71, 72, 73, and 74.

[0450] In some specific embodiments, the vector is a DNA vector and comprises a multi-antigen construct comprising a nucleotide sequence selected from the group consisting of:

[0451] (1) a nucleotide sequence consisting of nucleotides 10-3264 of SEQ ID NO:30;

[0452] (2) a nucleotide sequence consisting of nucleotides 10-3243 of SEQ ID NO:32;

[0453] (3) a nucleotide sequence consisting of nucleotides 10-3255 of SEQ ID NO:34;

[0454] (4) a nucleotide sequence consisting of nucleotides 10-3090 of SEQ ID NO:36;

[0455] (5) a nucleotide sequence consisting of nucleotides 10-4143 of SEQ ID NO:38;

[0456] (6) a nucleotide sequence consisting of nucleotides 10-4323 of SEQ ID NO:40; and

[0457] (7) a nucleotide sequences that is a degenerate variant of any of the nucleotide sequences of (1)-(6) above.

[0458] In some other specific embodiments, the present disclosure provides a RNA vector, which comprises a nucleotide sequence that corresponds to a nucleotide sequence selected from the group consisting of:

[0459] (1) a nucleotide sequence consisting of nucleotides 10-3264 of SEQ ID NO:30;

[0460] (2) a nucleotide sequence consisting of nucleotides 10-3243 of SEQ ID NO:32;

[0461] (3) a nucleotide sequence consisting of nucleotides 10-3255 of SEQ ID NO:34;

[0462] (4) a nucleotide sequence consisting of nucleotides 10-3090 of SEQ ID NO:36;

[0463] (5) a nucleotide sequence consisting of nucleotides 10-4143 of SEQ ID NO:38;

[0464] (6) a nucleotide sequence consisting of nucleotides 10-4323 of SEQ ID NO:40; and

[0465] (7) a nucleotide sequence that is a degenerate variant of any of the nucleotide sequences of (1)-(6) above.

[0466] In some other embodiments, the vector contains a multi-antigen construct encoding (i) at least one immunogenic MUC1 polypeptide, (ii) at least one immunogenic CEA polypeptide, and (iii) at least one immunogenic TERT polypeptide. The vector may be a DNA plasmid vector, DNA virus vector, RNA plasmid vector, or RNA virus vector. In some specific embodiments, the present disclosure provides a DNA vector, which comprises a multi-antigen construct comprising a nucleotide sequence selected from the group consisting of:

[0467] (1) a nucleotide sequence consisting of nucleotides 10-6009 of SEQ ID NO:42;

[0468] (2) a nucleotide sequence consisting of nucleotides 10-6003 of SEQ ID NO:44;

[0469] (3) a nucleotide sequence consisting of nucleotides 10-6024 of SEQ ID NO:46;

[0470] (4) a nucleotide sequence consisting of nucleotides 10-5988 of SEQ ID NO:48;

[0471] (5) a nucleotide sequence consisting of nucleotides 10-5829 of SEQ ID NO:50; or

[0472] (6) a nucleotide sequence consisting of nucleotides 10-5829 of SEQ ID NO:52; and

[0473] (7) a nucleotide sequence that is a degenerate variant of any of the nucleotide sequences of (1)-(6) above.

[0474] In some specific embodiments, the present disclosure provides a DNA viral vector consisting of a nucleotide sequence of any of SEQ ID NOs:58, 60, 62, 64, 66, and 68. In some other specific embodiments, the present disclosure provides a DNA plasmid vector consisting of the a nucleotide sequence of any of SEQ ID NOs:57, 59, 61, 63, 65, 67, 69, 70, 71, 72, 73, and 74.

[0475] In some other specific embodiments, the present disclosure provides a RNA vector, which comprises a nucleotide sequence that corresponds to a nucleotide sequence selected from the group consisting of:

[0476] (1) a nucleotide sequence consisting of nucleotides 10-6009 of SEQ ID NO:42;

[0477] (2) a nucleotide sequence consisting of nucleotides 10-6003 of SEQ ID NO:44;

[0478] (3) a nucleotide sequence consisting of nucleotides 10-6024 of SEQ ID NO:46;

[0479] (4) a nucleotide sequence consisting of nucleotides 10-5988 of SEQ ID NO:48;

[0480] (5) a nucleotide sequence consisting of nucleotides 10-5829 of SEQ ID NO:50;

[0481] (6) a nucleotide sequence consisting of nucleotides 10-5829 of SEQ ID NO:52; and

[0482] (7) a nucleotide sequence that is a degenerate variant of any of the nucleotide sequences of (1)-(6) above.

### E. Compositions Comprising an Antigen Construct or Vector

[0483] The present disclosure also provides compositions, which comprise an isolated nucleic acid molecule (i.e., an antigen construct) or a vector provided by the present disclosure. A composition may comprise only one individual antigen construct, such as a dual-antigen construct or a triple-antigen construct. It may also comprise two or more different individual antigen constructs, such as a combination of a single-antigen construct and a dual-antigen construct, or a combination of three or more single-antigen constructs encoding different immunogenic TAA polypeptides. The compositions are useful for eliciting an immune response against a TAA protein in vitro or in vivo in a mammal, including a human. In some embodiments, the compositions are immunogenic compositions or pharmaceutical compositions. In some particular embodiments, the composition is a vaccine composition for administration to humans for (1) inhibiting abnormal cell proliferation, providing protection against the development of cancer (used as a prophylactic), (2) treatment of cancer (used as a therapeutic) associated with TAA over-expression, or (3) eliciting an immune response to a particular human TAA, such as CEA, MUC1, and TERT.

[0484] In some embodiments, a composition provided by the present disclosure comprises a multi-antigen construct or a vector comprising a multi-antigen construct, wherein the multi-antigen construct encodes two or more immunogenic TAA polypeptides. For example, a multi-antigen construct may encode two or more immunogenic TAA polypeptides in any of the following combinations:

[0485] (1) an immunogenic CEA polypeptide and an immunogenic MUC1 polypeptide;

[0486] (2) an immunogenic CEA polypeptide and an immunogenic TERT polypeptide; and

[0487] (3) an immunogenic CEA polypeptide, an immunogenic MUC1 polypeptide, and an immunogenic TERT polypeptide.

[0488] In some particular embodiments, the composition provided by the present disclosure comprises a dual-antigen construct or a vector comprising a dual-antigen construct, wherein the dual-antigen construct comprises a nucleotide sequence selected from the group consisting of:

[0489] (1) a nucleotide sequence encoding the amino acid sequence of SEQ ID NO:31 or amino acids 4-1088 of SEQ ID NO:31;

[0490] (2) a nucleotide sequence encoding the amino acid sequence of SEQ ID NO:33 or amino acids 4-1081 of SEQ ID NO:33;

[0491] (3) a nucleotide sequence encoding the amino acid sequence of SEQ ID NO:35 or amino acids 4-1085 of SEQ ID NO:35;

[0492] (4) a nucleotide sequence encoding the amino acid sequence of SEQ ID NO:37 or amino acids 4-1030 of SEQ ID NO:37;

[0493] (5) a nucleotide sequence encoding the amino acid sequence of SEQ ID NO:39 or amino acids 4-1381 of SEQ ID NO:39;

[0494] (6) a nucleotide sequence encoding the amino acid sequence of SEQ ID NO:41 or amino acids 4-1441 of SEQ ID NO:41;

[0495] (7) the nucleotide sequence of SEQ ID NO:30 or a nucleotide sequence comprising nucleotides 10-3264 of SEQ ID NO:30;

[0496] (8) the nucleotide sequence of SEQ ID NO:32 or a nucleotide sequence comprising nucleotides 10-3243 of SEQ ID NO:32;

[0497] (9) the nucleotide sequence of SEQ ID NO:34 or a nucleotide sequence comprising nucleotides 10-3255 of SEQ ID NO:34;

[0498] (10) the nucleotide sequence of SEQ ID NO:36 or a nucleotide sequence comprising nucleotides 10-3090 of SEQ ID NO:36;

[0499] (11) the nucleotide sequence of SEQ ID NO:38 or a nucleotide sequence comprising nucleotides 10-4143 of SEQ ID NO:38;

[0500] (12) the nucleotide sequence of SEQ ID NO:40 or a nucleotide sequence comprising nucleotides 10-4323 of SEQ ID NO:40; and

[0501] (13) a nucleotide sequences that is a degenerate variant of any of the nucleotide sequences of (1)-(12) above.

[0502] In some other particular embodiments, the compositions provided by the present disclosure comprise (1) a triple-antigen construct, or (2) a vector comprising a triple-antigen construct, wherein the triple antigen construct comprises a nucleotide sequence selected from the group consisting of:

[0503] (1) a nucleotide sequence encoding the amino acid sequence of SEQ ID NO:43 or amino acids 4-2003 of SEQ ID NO:43;

[0504] (2) a nucleotide sequence encoding the amino acid sequence of SEQ ID NO:45 or amino acids 4-2001 of SEQ ID NO:45;

[0505] (3) a nucleotide sequence encoding the amino acid sequence of SEQ ID NO:47 or amino acids 4-2008 of SEQ ID NO:47;

[0506] (4) a nucleotide sequence encoding the amino acid sequence of SEQ ID NO:49 or amino acids 4-1996 of SEQ ID NO: 49;

[0507] (5) a nucleotide sequence encoding the amino acid sequence of SEQ ID NO:51 or amino acids 4-1943 of SEQ ID NO:51;

[0508] (6) a nucleotide sequence encoding the amino acid sequence of SEQ ID NO:53 or amino acids 4-1943 of SEQ ID NO:53;

[0509] (7) the nucleotide sequence of SEQ ID NO:42 or a nucleotide sequence comprising nucleotides 10-6009 of SEQ ID NO:42;

[0510] (8) the nucleotide sequence of SEQ ID NO:44 or a nucleotide sequence comprising nucleotides 10-6003 of SEQ ID NO:44;

[0511] (9) the nucleotide sequence of SEQ ID NO:46 or a nucleotide sequence comprising nucleotides 10-6024 of SEQ ID NO:46;

[0512] (10) the nucleotide sequence of SEQ ID NO:48 or a nucleotide sequence comprising nucleotides 10-5988 of SEQ ID NO:48;

[0513] (11) the nucleotide sequence of SEQ ID NO:50 or a nucleotide sequence comprising nucleotides 10-5829 of SEQ ID NO:50;

[0514] (12) the nucleotide sequence of SEQ ID NO:52 or a nucleotide sequence comprising nucleotides 10-5829 of SEQ ID NO:52; and

[0515] (13) a nucleotide sequence that is a degenerate variant of any of the nucleotide sequences of (1)-(12) above.

[0516] In some other particular embodiments, the compositions provided by the present disclosure comprise a triple-antigen construct, or a vector comprising a triple-antigen construct, wherein the triple antigen construct comprises a nucleotide sequence selected from the group consisting of:

[0517] (1) a nucleotide sequence consisting of nucleotides 10-6009 of SEQ ID NO:42;

[0518] (2) a nucleotide sequence consisting of nucleotides 10-6003 of SEQ ID NO:44;

[0519] (3) a nucleotide sequence consisting of nucleotides 10-6024 of SEQ ID NO:46;

[0520] (4) a nucleotide sequence consisting of nucleotides 10-5988 of SEQ ID NO:48;

[0521] (5) a nucleotide sequence consisting of nucleotides 10-5829 of SEQ ID NO:50;

[0522] (6) a nucleotide sequence consisting of nucleotides 10-5829 of SEQ ID NO:52; and

[0523] (7) a nucleotide sequence that is a degenerate variant of any of the nucleotide sequences of (1)-(7 above.

[0524] In other particular embodiments, the compositions provided by the present disclosure comprises a RNA triple-antigen construct, or a RNA vector comprising a triple-antigen construct, wherein the triple antigen construct comprises a nucleotide sequence that corresponds to (1) any of the sequences of SEQ ID NOs:42, 44, 46, 48, 50, 52 or (2) a nucleotide sequence that is a degenerate variant of any of the nucleotide sequences of SEQ ID NOs:42, 44, 46, 48, 50, 52.

[0525] In other particular embodiments, the compositions provided by the present disclosure comprise a RNA triple-antigen construct, or a RNA vector comprising a triple-antigen construct, wherein the triple antigen construct consists of a nucleotide sequence that corresponds to (1) any of the sequences of SEQ ID NOs:42, 44, 46, 48, 50, 52 or (2) a nucleotide sequence that is a degenerate variant of any of the nucleotide sequences of SEQ ID NOs:42, 44, 46, 48, 50, 52.

[0526] In still other particular embodiments, the compositions provided by the present disclosure comprise a triple-antigen construct, or a vector comprising a triple-antigen construct, wherein the triple antigen construct comprises (1) a nucleotide sequence of any of SEQ ID NOS: 87, 88, 89, 90, 91, and 92 or (2) degenerate variant of a nucleotide sequence of any of SEQ ID NOS: 87, 88, 89, 90, 91, and 92. In some other particular embodiments, the present disclosure provides a composition comprising a plasmid, wherein the plasmid comprises a nucleotide sequence of any of SEQ ID Nos: 57, 59, 61, 63, 65, and 67. In still other particular embodiments, the present disclosure provides a composition comprising a vector, wherein the vector comprises a nucleotide sequence of any of SEQ ID Nos: 58, 60, 62, 64, 66, and 68.

[0527] In still other particular embodiments, the compositions provided by the present disclosure comprise a triple-antigen construct, or a vector comprising a triple-antigen construct, wherein the triple antigen construct consists of (1) a nucleotide sequence of any of SEQ ID NOS: 87, 88, 89, 90, 91, and 92 or (2) degenerate variant of a nucleotide sequence of any of SEQ ID NOS: 87, 88, 89, 90, 91, and 92. In some other particular embodiments, the present disclosure provides a composition comprising a plasmid, wherein the plasmid consists of a nucleotide sequence of any of SEQ ID Nos: 57, 59, 61, 63, 65, and 67. In still other particular embodiments, the present disclosure provides a composition comprising a vector, wherein the vector consists of a nucleotide sequence of any of SEQ ID Nos: 58, 60, 62, 64, 66, and 68.

[0528] The compositions, such as a pharmaceutical composition or a vaccine composition, may further comprise a pharmaceutically acceptable excipient. Pharmaceutically acceptable excipients for nucleic acid compositions, including DNA vaccine and RNA vaccine compositions, are well known to those skilled in the art. Such excipients may be aqueous or nonaqueous solutions, suspensions, and emulsions. Examples of non-aqueous excipients include propylene glycol, polyethylene glycol, vegetable oils such as olive oil, and injectable organic esters such as ethyl oleate. Examples of aqueous excipient include water, alcoholic/aqueous solutions, emulsions or suspensions, including saline and buffered media. Suitable excipients also include agents that assist in cellular uptake of the polynucleotide molecule. Examples of such agents are (i) chemicals that modify cellular permeability, such as bupivacaine, (ii) liposomes or viral particles for encapsulation of the polynucleotide, or (iii) cationic lipids or silica, gold, or tungsten microparticles which associate themselves with the polynucleotides. Anionic and neutral liposomes are well-known in the art (see, e.g., Liposomes: A Practical Approach, RPC New Ed, IRL press (1990), for a detailed description of methods for making liposomes) and are useful for delivering a large range of products, including polynucleotides.

[0529] An immunogenic composition, pharmaceutical composition, or vaccine composition provided by the present disclosure may be used in conjunction or combination with one or more immune modulators. The composition may also be used in conjunction or combination with one or more adjuvants. Further, the composition may be used in conjunction or combination with one or more immune modulators and one or more adjuvants. The immune modulators or adjuvants may be formulated separately from the antigen construct or vector, or they may be part of the same composition formulation. Thus, in some embodiments, the present disclosure provides a pharmaceutical composition that comprises (1) an antigen construct provided by the present disclosure or vector containing such an antigen construct and (2) an immune modulator. In some further embodiments, the pharmaceutical composition further comprises an adjuvant. Examples of immune modulators and adjuvants are provided herein below.

[0530] The compositions, including vaccine compositions, can be prepared in any suitable dosage forms, such as liquid forms (e.g., solutions, suspensions, or emulsions) and solid forms (e.g., capsules, tablets, or powder), and by methods known to one skilled in the art.

### F. Uses of the Antigen Constructs, Vectors, and Compositions

[0531] In other aspects, the present disclosure provides (1) use of the antigen constructs, vectors, and compositions as medicament, (2) use of the antigen constructs, vectors, and compositions in the manufacture of a medicament for eliciting an immune response against a TAA, for inhibiting abnormal cell proliferation, or for treating a cancer, and (3) methods of using the antigen constructs, vectors, and compositions, wherein the antigen constructs, vectors, and compositions are as described herein above.

[0532] In one aspect, the present disclosure provides use of (1) an antigen construct encoding one or more immunogenic TAA polypeptides, (2) a vector containing such an antigen construct, or (3) a composition containing such as antigen-construct or vector for eliciting an immune response against a TAA in a mammal, such as a human. In some embodiments, the disclosure provides a method of eliciting an immune response against a TAA in a mammal, particularly a human, which method comprises administering to the mammal an effective amount of a composition comprising (1) an antigen construct encoding one or more immunogenic TAA polypeptides or (2) a vector containing an antigen construct encoding one or more immunogenic TAA polypeptides. In some embodiments, the disclosure provides a method of eliciting an immune response against CEA in a mammal, particularly a human, comprising administering to the mammal an effective amount of a composition comprising an antigen construct provided by the present disclosure, wherein the antigen construct comprises (1) at least one nucleotide sequence encoding an immunogenic CEA polypeptide and (2) at least one nucleotide sequence encoding an immunogenic MUC1 polypeptide or an immunogenic TERT polypeptide. In some other embodiments, the disclosure provides a method of eliciting an immune response against MUC1 in a mammal, particularly a human, comprising administering to the mammal an effective amount of a composition comprising an antigen construct provided by the present disclosure, wherein the antigen construct comprises (1) at least one nucleotide sequence encoding an immunogenic MUC1 polypeptide and (2) at least one nucleotide sequence encoding an immunogenic CEA polypeptide or an immunogenic TERT polypeptide. In some further embodiments, the disclosure provides a method of eliciting an immune response against TERT in a mammal, particularly a human, comprising administering to the mammal an effective amount of a composition comprising an antigen construct provided by the present disclosure, wherein the antigen construct comprises (1) at least one nucleotide sequence encoding an immunogenic TERT polypeptide and (2) at least one nucleotide sequence encoding an immunogenic MUC1 polypeptide or an immunogenic CEA polypeptide.

[0533] In another aspect, the present disclosure provides use of (1) an antigen construct encoding one or more immunogenic TAA polypeptides, (2) a vector containing such an antigen construct, or (3) a composition containing such as antigen-construct or vector for inhibiting abnormal cell proliferation in a mammal, such as a human. In some embodiments, the present disclosure provides a method of inhibiting abnormal cell proliferation in a mammal, particularly a human, comprising administering to the mammal an effective amount of a composition comprising (1) an antigen construct encoding one or more immunogenic TAA polypeptides or (2) a vector containing an antigen construct encoding one or more immunogenic TAA polypeptides, wherein the abnormal cell proliferation is associated with over-expression of the tumor-associated antigen CEA, MUC1, or TERT. The abnormal cell proliferation may be in any organ or tissues of a human, such as breast, stomach, ovaries, lungs, bladder, large intestine (e.g., colon and rectum), kidneys, pancreas, and prostate. In some embodiments, the method is for inhibiting abnormal cell proliferation in the breast, ovaries, pancreas, colon, lung, stomach, and rectum. The antigen construct or vector in the composition administered encodes at least one immunogenic polypeptide that is derived from, or immunogenic against, the over-expressed tumor-associated antigen. The antigen construct may be a single-antigen construct or a multi-antigen construct, such as a dual-antigen construct or a triple-antigen construct. In some specific embodiments, the composition comprises a triple-antigen construct encoding an immunogenic CEA polypeptide, an immunogenic MUC1 polypeptide, and an immunogenic TERT polypeptide.

[0534] In a further aspect, the present disclosure provides use of (1) an antigen construct encoding one or more immunogenic TAA polypeptides, (2) a vector containing such an antigen construct, or (3) a composition containing such as antigen-construct or vector as a medicament for treatment of a cancer in a mammal, particularly a human. In some embodiments, the present disclosure provides a method of treating a cancer in a human, wherein the cancer is associated with over-expression of one or more of the tumor-associated antigen CEA, MUC1, and TERT. The method comprises administering to the human an effective amount of a composition that comprises an antigen construct encoding at least one immunogenic polypeptide that is derived from, or immunogenic against, the over-expressed tumor-associated antigen in the particular cancer. The antigen construct may be a single-antigen construct or a multi-antigen construct, such as a dual-antigen construct or a triple-antigen construct. In some specific embodiments, the composition comprises a triple-antigen construct encoding an immunogenic CEA polypeptide, an immunogenic MUC1 polypeptide, and an immunogenic TERT polypeptide. Any cancer that over-expresses the tumor-associate antigen MUC1, CEA, and/or TERT may be treated by a method provided by the present disclosure. Examples of cancers include breast cancer, ovarian cancer, lung cancer (such as small cell lung cancer and non-small cell lung cancer), colorectal cancer, gastric cancer, and pancreatic cancer. In some particular embodiments, the present disclosure provide a method of treating cancer in a human, which comprises administering to the human an effective amount of a composition comprising a triple-antigen construct, wherein the cancer is (1) breast cancer, such as estrogen-receptor and/or progesterone-receptor positive breast cancer, HER2 positive breast cancer, or triple-negative breast cancer, (2) lung cancer, such as NSCLC or SCLC, (3) gastric cancer, (4) pancreatic cancer, or (5) colorectal cancer.

[0535] In some specific embodiments, the present disclosure provides a method of eliciting an immune response against a TAA, a method of inhibiting abnormal cell proliferation, or a method of treating a cancer in a mammal, particularly a human, which method comprises administering to the mammal an effective amount of a composition comprising a multi-antigen construct or vector comprising a multi-antigen construct, wherein the multi-antigen construct comprises a nucleotide sequence encoding any of the amino acid sequence of SEQ ID Nos: 43, 45, 47, 49, 51, and 53. In other specific embodiments, the present disclosure provides a method of eliciting an immune response against a TAA, a method of inhibiting abnormal cell proliferation, or a method of treating a cancer in a mammal, particularly a human, which method comprises administering to the mammal an effective amount of a composition comprising a multi-antigen construct, wherein the multi-antigen construct comprises a nucleotide sequence of any of SEQ ID Nos: 42, 44, 46, 48, 50, 52, and 87-92. In other specific embodiments, the present disclosure provides a method of eliciting an immune response against a TAA, a method of inhibiting abnormal cell proliferation, or a method of treating a cancer in a mammal, particularly a human, which method comprises administering to the mammal an effective amount of a composition comprising a vector, wherein the vector comprises a nucleotide sequence of any of SEQ ID Nos: 57-68.

[0536] The compositions can be administered to a mammal, including human, by a number of suitable methods known in the art. Examples of suitable methods include: (1) intramuscular, intradermal, intraepidermal, or subcutaneous administration, (2) oral administration, and (3) topical application (such as ocular, intranasal, and intravaginal application). One particular method of intradermal or intraepidermal administration of a nucleic acid vaccine composition, particularly composition containing a DNA plasmid, is gene gun delivery using the Particle Mediated Epidermal Delivery (PMED™) vaccine delivery device marketed by PowderMed. PMED is a needle-free method of administering vaccines to animals or humans. The PMED system involves the precipitation of DNA onto microscopic gold particles that are then propelled by helium gas into the epidermis. The DNA-coated gold particles are delivered to the APCs and keratinocytes of the epidermis, and once inside the nuclei of these cells, the DNA elutes off the gold and becomes transcriptionally active, producing encoded protein. Another particular method for intramuscular administration of a nucleic acid vaccine involves electroporation. Electroporation uses controlled electrical pulses to create temporary pores in the cell membrane, which facilitates cellular uptake of the nucleic acid vaccine injected into the muscle. Where a CpG is used in combination with a nucleic acid vaccine, the CpG and nucleic acid vaccine may be co-formulated in one formulation and the formulation is administered intramuscularly by electroporation.

[0537] The effective amount of the composition to be administered in a given method can be readily determined by a person skilled in the art and will depend on a number of factors. In a method of treating cancer, such as pancreatic cancer, ovarian cancer, lung cancer, colorectal cancer, gastric cancer, and breast cancer, factors that may be considered in determining the effective amount include the subject to be treated, including the subject's immune status and health, the severity or stage of the cancer to be treated, the specific immunogenic TAA polypeptides expressed, the degree of protection or treatment desired, the administration method and schedule, and other therapeutic agents (such as adjuvants or immune modulators) used. The method of formulation and delivery are among the key factors for determining the dose of the nucleic acid required to elicit an effective immune response. For example, the effective amounts of the nucleic acid in a vaccine may be in the range of 2 μg/dose-10 mg/dose when the vaccine is formulated as an aqueous solution and administered by hypodermic needle injection or pneumatic injection, whereas only 16 ng/dose-16 μg/dose may be required when the nucleic acid is prepared as coated gold beads and delivered using a gene gun technology. The dose range for a nucleic acid in a vaccine by electroporation is generally in the range of 0.5-10 mg/dose. In the case where the nucleic acid vaccine is administered together with a CpG by electroporation in a co-formulation, the dose of the nucleic acid vaccine may be in the range of 0.5-5 mg/dose and the dose of CpG is typically in the range of 0.05 mg-5 mg/dose, such as 0.05, 0.2, 0.6, or 1.2 mg/dose per person.

[0538] The vaccine compositions provided by the present disclosure can be used in a prime-boost strategy to induce robust and long-lasting immune response. Priming and boosting vaccination protocols based on repeated injections of the same immunogenic construct are well known. In general, the first dose of the vaccine may not be able to produce protective immunity, but only “primes” the immune system. A protective immune response develops after the second, third, or subsequent doses (the “boosts”). The boosts are performed according to conventional techniques, and can be further optimized empirically in terms of schedule of administration, route of administration, choice of adjuvant, dose, and potential sequence when administered with another vaccine. In one embodiment, the vaccine compositions are used in a conventional homologous prime-boost strategy, in which the same vaccine is administered to the animal in both the prime and boosts doses. For example, the same vaccine composition containing a plasmid vector is administered in both the initial doses (“prime’) and subsequent doses (“boost”). In another embodiment, the vaccine compositions are used in a heterologous prime-boost vaccination, in which different types of vaccines expressing the same immunogenic TAA polypeptide(s) are administered at predetermined time intervals. For example, an antigen construct is administered in the form of a plasmid vector in the prime dose and in the form of a viral vector in the boost doses, or vice versa.

[0539] The vaccine compositions may be used together with one or more adjuvants. Examples of suitable adjuvants include: (1) oil-in-water emulsion formulations, such as MF59 and AS03, (2) saponin adjuvants, such as QS21 and Iscomatrix® (Commonwealth Serum Laboratories, Australia); (3) Complete Freund's Adjuvant (CFA) and Incomplete Freund's Adjuvant (IFA); (4) cytokines, such as interleukins (e.g. IL-1, IL-2, IL-4, IL-5, IL-6, IL-7, IL-12, interferons (e.g. gamma interferon), macrophage colony stimulating factor (M-CSF), and tumor necrosis factor (TNF); (5) monophosphoryl lipid A (MPL) or 3-O-deacylated MPL (3dMPL); (6) oligonucleotides comprising CpG motifs; and (7) metal salt, including aluminum salts (alum), such as aluminum phosphate and aluminum hydroxide.

[0540] Further, for the treatment of a neoplastic disorder, including a cancer, in a mammal, including human, the compositions may be administered in combination with one or more immune modulators. The immune modulator may be an immune-suppressive-cell inhibitor (ISC inhibitor) or an immune-effector-cell enhancer (IEC enhancer). Further, one or more ISC inhibitors may be used in combination with one or more IEC enhancers. The immune modulators may be administered by any suitable methods and routes, including (1) systemic administration such as intravenous, intramuscular, or oral administration, and (2) local administration such intradermal and subcutaneous administration. Where appropriate or suitable, local administration is generally preferred over systemic administration. Local administration of any immune modulators can be carried out at any location of the body of the mammal that is suitable for local administration of pharmaceuticals; however, it is more preferable that these immune modulators are administered locally at close proximity to the vaccine draining lymph node.

[0541] The compositions, such as a vaccine, may be administered simultaneously or sequentially with any or all of the immune modulators used. Similarly, when two or more immune modulators are used, they may be administered simultaneously or sequentially with respect to each other. In some embodiments, a vaccine is administered simultaneously (e.g., in a mixture) with respect to one immune modulator, but sequentially with respect to one or more additional immune modulators. Co-administration of the vaccine and the immune modulators can include cases in which the vaccine and at least one immune modulator are administered so that each is present at the administration site, such as vaccine draining lymph node, at the same time, even though the antigen and the immune modulators are not administered simultaneously. Co-administration of the vaccine and the immune modulators also can include cases in which the vaccine or the immune modulator is cleared from the administration site, but at least one cellular effect of the cleared vaccine or immune modulator persists at the administration site, such as vaccine draining lymph node, at least until one or more additional immune modulators are administered to the administration site. In cases where a nucleic acid vaccine is administered in combination with a CpG, the vaccine and CpG may be contained in a single formulation and administered together by any suitable method. In some embodiments, the nucleic acid vaccine and CpG in a co-formulation (mixture) is administered by intramuscular injection in combination with electroporation.

[0542] In some embodiments, the immune modulator is an ISC inhibitor. Examples of ISC inhibitors include (1) protein kinase inhibitors, such as imatinib, sorafenib, lapatinib, BIRB-796, and AZD-1152, AMG706, Zactima (ZD6474), MP-412, sorafenib (BAY 43-9006), dasatinib, CEP-701 (lestaurtinib), XL647, XL999, Tykerb (lapatinib), MLN518, (formerly known as CT53518), PKC412, ST1571, AEE 788, OSI-930, OSI-817, sunitinib malate (Sutent), axitinib (AG-013736), erlotinib, gefitinib, axitinib, bosutinib, temsirolismus and nilotinib (AMN107). In some particular embodiments, the tyrosine kinase inhibitor is sunitinib, sorafenib, or a pharmaceutically acceptable salt or derivative (such as a malate or a tosylate) of sunitinib or sorafenib; (2) cyclooxygenase-2 (COX-2) inhibitors, such as celecoxib and rofecoxib; (3) phosphodiesterase type 5 (PDES) inhibitors, such as avanafil, lodenafil, mirodenafil, sildenafil, tadalafil, vardenafil, udenafil, and zaprinast, (4) DNA crosslinkers, such as cyclophosphamide, (5) PARP inhibitors, such as talazoparib, and (6) CDK inhibitors, such palbocyclib.

[0543] In some embodiments, the immune modulator that is used in combination with a nucleic acid composition is an IEC enhancer. Two or more IEC enhancers may be used together. Examples of IEC enhancers that may be used include: (1) TNFR agonists, such as agonists of OX40, 4-1BB (such as BMS-663513), GITR (such as TRX518), and CD40 (such as CD40 agonistic antibodies); (2) CTLA-4 inhibitors, such as is Ipilimumab and Tremelimumab; (3) TLR agonists, such as CpG 7909 (5′ TCGTCGTTTTGTCGTTTTGTCGTT3′), CpG 24555 (5′ TCGTCGTTTTTCGGTGCTTTT3′ (CpG 24555); and CpG 10103 (5′ TCGTCGTTTTTCGGTCGTTTT3′); (4) programmed cell death protein 1 (PD-1) inhibitors, such as nivolumab and pembrolizumab; and (5) PD-L1 inhibitors, such as atezolizumab, durvalumab, and velumab; and (6) 001 inhibitors.

[0544] In some embodiments, the IEC enhancer is CD40 agonist antibody, which may be a human, humanized or part-human chimeric anti-CD40 antibody. Examples of specific CD40 agonist antibodies include the G28-5, mAb89, EA-5 or S2C6 monoclonal antibody, and CP870,893. CP-870,893 is a fully human agonistic CD40 monoclonal antibody (mAb) that has been investigated clinically as an anti-tumor therapy. The structure and preparation of CP870,893 is disclosed in WO2003041070 (where the antibody is identified by the internal identified “21.4.1” and the amino acid sequences of the heavy chain and light chain of the antibody are set forth in SEQ ID NO: 40 and SEQ ID NO: 41, respectively). For use in combination with a composition present disclosure, CP-870,893 may be administered by any suitable route, such as intradermal, subcutaneous, or intramuscular injection. The effective amount of CP870893 is generally in the range of 0.01-0.25 mg/kg. In some embodiment, CP870893 is administered at an amount of 0.05-0.1 mg/kg.

[0545] In some other embodiments, the IEC enhancer is a CTLA-4 inhibitor, such as Ipilimumab and Tremelimumab. Ipilimumab (also known as MEX-010 or MDX-101), marketed as YERVOY, is a human anti-human CTLA-4 antibody. Ipilimumab can also be referred to by its CAS Registry No. 477202-00-9, and is disclosed as antibody 10DI in PCT Publication No. WO 01/14424. Tremelimumab (also known as CP-675,206) is a fully human IgG2 monoclonal antibody and has the CAS number 745013-59-6. Tremelimumab is disclosed in U.S. Pat. No. 6,682,736, incorporated herein by reference in its entirety, where it is identified as antibody 11.2.1 and the amino acid sequences of its heavy chain and light chain are set forth in SEQ ID NOs:42 and 43, respectively. For use in combination with a composition provided by the present disclosure, Tremelimumab may be administered locally, particularly intradermally or subcutaneously. The effective amount of Tremelimumab administered intradermally or subcutaneously is typically in the range of 5-200 mg/dose per person. In some embodiments, the effective amount of Tremelimumab is in the range of 10-150 mg/dose per person per dose. In some particular embodiments, the effective amount of Tremelimumab is about 10, 25, 50, 75, 100, 125, 150, 175, or 200 mg/dose per person.

[0546] In some other embodiments, the immune modulator is a PD-1 inhibitor or PD-L1 inhibitor. Examples of PD-1 inhibitors include nivolumab (trade name Opdivo), pembrolizumab (trade name Keytruda), RN888 (anti-PD-1 antibody), pidilizumab (Cure Tech, AMP-224 (GSK), AMP-514 (GSK), and PDR001 (Novartis). Examples of PD-L1 inhibits include atezolizumab (PD-L1-specific mAbs; trade name Tecentriq), durvalumab (PD-L1-specific mAbs; trade name Imfinzi), and avelumab (PD-L1-specific mAbs; trade name Bavencio), and BMS-936559 (BMS). See also Okazaki T et al., International Immunology (2007); 19,7:813-824 and Sunshine J et al., Curr Opin Pharmacol. 2015 August; 23:32-8). In some specific embodiment, the PD-1 inhibitor is RN888. RN888 is a monoclonal antibody that specifically binds to PD-1. RN888 is disclosed in international patent application publication WO2016/092419, in which the antibody is identified as mAb7 having a full-length heavy chain amino acid sequence of SEQ ID NO:29 and full-length light chain amino acid sequence of SEQ ID NO:39.

[0547] In other embodiments, the immune modulator is an inhibitor of indoleamine 2,3-dioxygenase 1 (also known as “IDO1”). IDO1 was found to modulate immune cell function to a suppressive phenotype and was, therefore, believed to partially account for tumor escape from host immune surveillance. The enzyme degrades the essential amino acid tryptophan into kynurenine and other metabolites. It was found that these metabolites and the paucity of tryptophan leads to suppression of effector T-cell function and augmented differentiation of regulatory T cells. The 001 inhibitors may be large molecules, such as an antibody, or a small molecule, such as a chemical compound.

[0548] In some particular embodiments, the polypeptide or nucleic acid composition provided by the present disclosure is used in combination with a 1,2,5-oxadiazole derivative 001 inhibitor disclosed in WO2010/005958. Examples of specific 1,2,5-oxadiazole derivative IDO1 inhibitors include the following compounds:
[0549] 4-({2-[(aminosulfonyl)amino]ethyl}amino)-N-(3-bromo-4-fluorophenyl)-N′-hydroxy-1,2,5-oxadiazole-3-carboximidamide;
[0550] 4-({2 [(aminosulfonyl)amino]ethyl} amino)-N-(3-chloro-4-fluorophenyl)-N′-hydroxy-1,2,5-oxadiazole 3-carboximidamide;
[0551] 4-({2 [(aminosulfonyl)amino] ethyl} amino)-N-[4-fluoro-3-(trifluoromethyl)phenyl]-N′-hydroxy-1,2,5 oxadiazole-3-carboximidamide;
[0552] 4-({2 [(aminosulfonyl)amino] ethyl} amino)-N′-hydroxy-N-[3-(trifluoromethyl)phenyl]-1,2,5 oxadiazole-3-carboximidamide;
[0553] 4-({2 [(aminosulfonyl)amino]ethyl} amino)-N-(3-cyano-4-fluorophenyl)-N′-hydroxy-1,2,5-oxadiazole 3-carboximidamide;
[0554] 4-({2 [(aminosulfonyl)amino] ethyl} amino)-N-[(4-bromo-2-furyl)methyl]-N′-hydroxy-1,2,5 oxadiazole-3-carboximidamide; or
[0555] 4-({2 [(aminosulfonyl)amino] ethyl} amino)-N-[(4-chloro-2-furyl)methyl]-N′-hydroxy-1,2,5 oxadiazole-3-carboximidamide.

[0556] The 1,2,5-oxadiazole derivative IDO1 inhibitors are typically administered orally once or twice per day and effective amount by oral administration is generally in the range of 25 mg-1000 mg per dose per patient, such as 25 mg, 50 mg, 100 mg, 200 mg, 300 mg, 400 mg, 500 mg, 600 mg, 700 mg, 800 mg, or 1000 mg. In a particular embodiment, the polypeptide or nucleic acid composition provided by the present disclosure is used in combination with 4-({2-[(aminosulfonyl)amino]ethyl}amino)-N-(3-bromo-4-fiuorophenyl)-N′-hydroxy-1,2,5-oxadiazole-3-carboximidamide administered orally twice per day at 25 mg or 50 mg per dose. The 1,2,5-oxadiazole derivatives may be synthesized as described in U.S. Pat. No. 8,088,803, which is incorporated herein by reference in its entirety.

[0557] In some other specific embodiments, the polypeptide or nucleic acid composition provided by the present disclosure is used in combination with a pyrrolidine-2,5-dione derivative 001 inhibitor disclosed in WO2015/173764. Examples of specific pyrrolidine-2,5-dione derivative inhibitors include the following compounds:
[0558] 3-(5-fluoro-1H-indol-3-yl)pyrrolidine-2,5-dione,
[0559] (3-²H)-3-(5-fluoro-1H-indol-3-yl)pyrrolidine-2,5-dione;
[0560] (−)-(R)-3-(5-fluoro-1H-indol-3-yl)pyrrolidine-2,5-dione,
[0561] 3-(1H-indol-3-yl)pyrrolidine-2,5-dione,
[0562] (−)-(R)-3-(1H-indol-3-yl)pyrrolidine-2,5-dione,
[0563] 3-(5-chloro-1H-indol-3-yl)pyrrolidine-2,5-dione;
[0564] (−)-(R)-3-(5-chloro-1H-indol-3-yl)pyrrolidine-2,5-dione,
[0565] 3-(5-bromo-1H-indol-3-yl)pyrrolidine-2,5-dione,
[0566] 3-(5,6-difluoro-1H-indol-3-yl)pyrrolidine-2,5-dione; and
[0567] 3-(6-chloro-1H-indol-3-yl)pyrrolidine-2,5-dione.

[0568] The pyrrolidine-2,5-dione derivative 001 inhibitors are typically administered orally once or twice per day and the effective amount by oral administration is generally in the range of 50 mg-1000 mg per dose per patient, such as 125 mg, 250 mg, 500 mg, 750 mg, or 1000 mg. In a particular embodiment, the polypeptide or nucleic acid composition provided by the present disclosure is used in combination with 3-(5-fluoro-1H-indol-3-yl)pyrrolidine-2,5-dione administered orally once per day at 125-100 mg per dose per patient. The pyrrolidine-2,5-dione derivatives may be synthesized as described in U.S. patent application publication US2015329525, which is incorporated herein by reference in its entirety.

### G. Examples

[0569] The following examples are provided to illustrate certain embodiments of the invention. They should not be construed to limit the scope of the invention in any way. From the discussion above and these examples, one skilled in the art can ascertain the essential characteristics of the invention and, without departing from the spirit and scope thereof, can make various changes and modifications of the invention to adapt it to various usage and conditions.

### Example 1. Construction of Plasmids Containing a Single-Antigen Construct or Multi-Antigen Construct

[0570] Example 1 illustrates the construction of plasmid vectors containing a single-antigen construct, a dual-antigen construct, or a triple antigen construct. Unless as otherwise noted, reference to amino acid positions or residues of MUC1, CEA, and TERT protein refers to the amino acid sequence of human MUC1 isoform 1 precursor protein as set forth in SEQ ID NO:1, the amino acid sequence of human carcinoembryonic antigen (CEA) isoform 1 precursor protein as set forth in SEQ ID NO:2, and the amino acid sequence of human TERT isoform 1 precursor protein as set forth in SEQ ID NO:3, respectively. Structures of some of the primers used in the plasmid constructions are provided in Table 16.

[0571] 1A. Plasmids Containing a Single-Antigen Construct

[0572] Plasmid 1027 (MUC1).

[0573] Plasmid 1027 was generated using the techniques of gene synthesis and restriction fragment exchange. The amino acid sequence of human MUC1 with a 5× tandem repeat VNTR region was submitted to GeneArt for gene optimization and synthesis. The gene encoding the polypeptide was optimized for expression, synthesized, and cloned. The MUC-1 open reading frame was excised from the GeneArt vector by digestion with NheI and BglII and inserted into similarly digested plasmid pPJV7563. The open reading frame (ORF) nucleotide sequence of Plasmid 1027 is set forth in SEQ ID NO:4. The amino acid sequence encoded by Plasmid 1027 is set for in SEQ ID NO:5.

[0574] Plasmid 1361 (CEA).

[0575] Plasmid 1361 was constructed using the techniques of gene synthesis, PCR and Seamless cloning. First, the gene encoding the CEA reference sequence was codon optimized for expression at DNA2.0. The sequence encoding amino acids 2-702 was amplified by PCR with primers ID1361-1362_PCRF and ID1361-1362_PCRR. The amplicon was cloned into the NheI/Bgl II sites of pPJV7563 by Seamless cloning. The open reading frame nucleotide sequence of Plasmid 1361 is set forth in SEQ ID NO:14. The amino acid sequence encoded by Plasmid 1361 is set for in SEQ ID NO:15.

[0576] Plasmid 1386 (mCEA).

[0577] Plasmid 1386, which encodes a membrane-bound immunogenic CEA polypeptide (mCEA), was constructed using the techniques of PCR and Seamless cloning. First, the gene fragment encoding CEA amino acids 2-144 was amplified by PCR from plasmid 1361 with primers f pmed CEA SS and r CEA D1. Second, the gene fragment encoding CEA amino acids 323-702 was amplified by PCR from plasmid 1361 with primers f CEA D1-D4 and r pmed CEA GPI. The amplicons were ligated and cloned into the Nhe I/Bgl II sites of pPJV7563 by Seamless cloning. The open reading frame nucleotide sequence of Plasmid 1386 is set forth in SEQ ID NO:16. The amino acid sequence encoded by Plasmid 1386 is set for in SEQ ID NO:17.

[0578] Plasmid 1390 (cCEA).

[0579] Plasmid 1390, which encodes a cytoplasmic immunogenic CEA polypeptide (cCEA), was constructed using the techniques of PCR and Seamless cloning. First, the gene fragment encoding CEA amino acids 35-144 was amplified by PCR from plasmid 1361 with primers f pmed CEA D1 and r CEA D1. Second, the gene fragment encoding CEA amino acids 323-677 was amplified by PCR from plasmid 1361 with primers f CEA D1-D4 and r pmed CEA D7. The amplicons were ligated and cloned into the Nhe I/Bgl II sites of pPJV7563 by Seamless cloning. The open reading frame nucleotide sequence of Plasmid 1390 is set forth in SEQ ID NO:18. The amino acid sequence encoded by Plasmid 1390 is set for in SEQ ID NO:19.

[0580] Plasmid 1065 (Full Length TERT D712A/V713I).

[0581] Plasmid 1065 was generated using the techniques of gene synthesis and restriction fragment exchange. The amino acid sequence of human TERT with two mutations (D712A/V713I) designed to inactivate enzymatic activity was submitted to DNA2.0 for gene optimization and synthesis. The gene encoding the polypeptide was optimized for expression, synthesized, and cloned. The TERT open reading frame was excised from the DNA2.0 vector by digestion with NheI and BglII and inserted into similarly digested plasmid pPJV7563. The amino acid sequence encoded by Plasmid 1065 is set for in SEQ ID NO:81. The open reading frame (ORF) nucleotide sequence of Plasmid 1065 is set forth in SEQ ID NO:82.

[0582] Plasmid 1112 (TERT240).

[0583] Plasmid 1112 was constructed using the techniques of PCR and Seamless cloning. First, the gene encoding TERT amino acids 241-1132 was amplified by PCR from plasmid 1065 with primers f pmed TERT 241G and r TERT co# pMed. The amplicon was cloned into the Nhe I/Bgl II sites of pPJV7563 by Seamless cloning. The open reading frame nucleotide sequence of Plasmid 1112 is set forth in SEQ ID NO:8. The amino acid sequence encoded by Plasmid 1112 is set for in SEQ ID NO:9.

[0584] Plasmid 1197 (cMUC1).

[0585] Plasmid 1197, which encodes a cytoplasmic immunogenic MUC1 polypeptide (cMUC1), was constructed using the techniques of PCR and Seamless cloning. First, the gene encoding MUC1 amino acids 22-225, 946-1255 was amplified by PCR from plasmid 1027 with primers ID1197F and ID1197R. The amplicon was cloned into the Nhe I/Bgl II sites of pPJV7563 by Seamless cloning. The open reading frame nucleotide sequence of Plasmid 1197 is set forth in SEQ ID NO:6. The amino acid sequence encoded by Plasmid 1197 is set for in SEQ ID NO:7.

[0586] Plasmid 1326 (TERT343).

[0587] Plasmid 1326 was constructed using the techniques of PCR and Seamless cloning. First, the gene encoding TERT amino acids 344-1132 was amplified by PCR from plasmid 1112 with primers TertΔ343-F and Tert-R. The amplicon was cloned into the Nhe I/Bgl II sites of pPJV7563 by Seamless cloning. The open reading frame nucleotide sequence of Plasmid 1326 is set forth in SEQ ID NO:10. The amino acid sequence encoded by Plasmid 1326 is set for in SEQ ID NO:11.

[0588] Plasmid 1330 (TERT541).

[0589] Plasmid 1330 was constructed using the techniques of PCR and Seamless cloning. First, the gene encoding TERT amino acids 542-1132 was amplified by PCR from plasmid 1112 with primers TertΔ541-F and Tert-R. The amplicon was cloned into the Nhe I/Bgl II sites of pPJV7563 by Seamless cloning. The open reading frame nucleotide sequence of Plasmid 1330 is set forth in SEQ ID NO:12. The amino acid sequence encoded by Plasmid 1330 is set for in SEQ ID NO:13.

[0590] 1B. Plasmids Containing a Dual-Antigen Construct

[0591] Plasmid 1269 (Muc1-Tert240).

[0592] Plasmid 1269 was constructed using the techniques of PCR and Seamless cloning. First, the gene encoding the human telomerase amino acids 241-1132 was amplified by PCR from plasmid 1112 with primers f tg link Ter240 and r pmed Bgl Ter240. The gene encoding human Mucin-1 amino acids 2-225, 946-1255 was amplified by PCR from plasmid 1027 with primers f pmed Nhe Muc and r link muc. PCR resulted in the addition of an overlapping GGSGG linker at the 5′ end of Tert and 3′ end of Muc1. The amplicons were mixed together and cloned into the Nhe I/Bgl II sites of pPJV7563 by Seamless cloning. The open reading frame nucleotide sequence of Plasmid 1269 is set forth in SEQ ID NO:20. The amino acid sequence encoded by Plasmid 1269 is set for in SEQ ID NO:21.

[0593] Plasmid 1270 (Muc1-ERB2A-Tert240).

[0594] Plasmid 1270 was constructed using the techniques of PCR and Seamless cloning. First, the gene encoding the human telomerase amino acids 241-1132 was amplified by PCR from plasmid 1112 with primers f2 ERBV2A, f1 ERBV2A Ter240, and r pmed Bgl Ter240. The gene encoding human Mucin-1 amino acids 2-225, 946-1255 was amplified by PCR from plasmid 1027 with primers f pmed Nhe Muc and r ERB2A Bamh Muc. PCR resulted in the addition of overlapping ERBV 2A sequences at the 5′ end of Tert and 3′ end of Muc1. The amplicons were mixed together and cloned into the Nhe I/Bgl II sites of pPJV7563 by Seamless cloning. The open reading frame nucleotide sequence of Plasmid 1270 is set forth in SEQ ID NO:22. The amino acid sequence encoded by Plasmid 1270 is set for in SEQ ID NO:23.

[0595] Plasmid 1271 (Tert240-ERB2A-Muc1).

[0596] Plasmid 1271 was constructed using the techniques of PCR and Seamless cloning. First, the gene encoding the human telomerase amino acids 241-1132 was amplified by PCR from plasmid 1112 with primers f pmed Nhe Ter240 and r ERB2A Bamh Ter240. The gene encoding human Mucin-1 amino acids 2-225, 946-1255 was amplified by PCR from plasmid 1027 with primers f2 ERBV2A, f1 ERBV2A Muc, and r pmed Bgl Muc. PCR resulted in the addition of overlapping ERBV 2A sequences at the 3′ end of Tert and 5′ end of Muc1. The amplicons were mixed together and cloned into the Nhe I/Bgl II sites of pPJV7563 by Seamless cloning. The open reading frame nucleotide sequence of Plasmid 1271 is set forth in SEQ ID NO:24. The amino acid sequence encoded by Plasmid 1271 is set for in SEQ ID NO:25.

[0597] Plasmid 1286 (cMuc1-ERB2A-Tert240).

[0598] Plasmid 1286 was constructed using the techniques of PCR and Seamless cloning. First, the gene encoding the human telomerase amino acids 241-1132 was amplified by PCR from plasmid 1112 with primers f2 ERBV2A, f1 ERBV2A Ter240, and r pmed Bgl Ter240. The gene encoding human Mucin-1 amino acids 22-225, 946-1255 was amplified by PCR from plasmid 1197 with primers f pmed Nhe cytMuc and r ERB2A Bamh Muc. PCR resulted in the addition of overlapping ERBV 2A sequences at the 5′ end of Tert and 3′ end of Muc1. The amplicons were mixed together and cloned into the Nhe I/Bgl II sites of pPJV7563 by Seamless cloning. The open reading frame nucleotide sequence of Plasmid 1286 is set forth in SEQ ID NO:26. The amino acid sequence encoded by Plasmid 1286 is set for in SEQ ID NO:27.

[0599] Plasmid 1287 (Tert240-ERB2A-cMuc1).

[0600] Plasmid 1287 was constructed using the techniques of PCR and Seamless cloning. First, the gene encoding the human telomerase amino acids 241-1132 was amplified by PCR from plasmid 1112 with primers f pmed Nhe Ter240 and r ERB2A Bamh Ter240. The gene encoding human Mucin-1 amino acids 22-225, 946-1255 was amplified by PCR from plasmid 1197 with primers f2 ERBV2A, f1 ERBV2A cMuc, and r pmed Bgl Muc. PCR resulted in the addition of overlapping ERBV 2A sequences at the 3′ end of Tert and 5′ end of Muc1. The amplicons were mixed together and cloned into the Nhe I/Bgl II sites of pPJV7563 by Seamless cloning. The open reading frame nucleotide sequence of Plasmid 1287 is set forth in SEQ ID NO:28. The amino acid sequence encoded by Plasmid 1287 is set for in SEQ ID NO: 29.

[0601] Plasmid 1409 (Muc1-EMC2A-mCEA).

[0602] Plasmid 1409 was constructed using the techniques of PCR and Seamless cloning. First, the gene encoding human Mucin-1 amino acids 2-225, 946-1255 was amplified by PCR from plasmid 1027 with primers f pmed Nhe Muc and r EM2A Bamh Muc. The gene encoding CEA amino acids 2-144, 323-702 was amplified by PCR from plasmid 1386 with primers f2 EMCV2A, f1 EMC2a CEAss, and r pmed CEA GPI. PCR resulted in the addition of overlapping EMCV 2A sequences at the 5′ end of CEA and 3′ end of Muc1. The amplicons were mixed together and cloned into the Nhe I/Bgl II sites of pPJV7563 by Seamless cloning. The open reading frame nucleotide sequence of Plasmid 1409 is set forth in SEQ ID NO:30. The amino acid sequence encoded by Plasmid 1409 is set for in SEQ ID NO:31.

[0603] Plasmid 1410 (mCEA-T2A-Muc1).

[0604] Plasmid 1410 was constructed using the techniques of PCR and Seamless cloning. First, the gene encoding CEA amino acids 2-144, 323-702 was amplified by PCR from plasmid 1386 with primers f pmed CEA SS and r T2A CEA. The gene encoding human Mucin-1 amino acids 2-225, 946-1255 was amplified by PCR from plasmid 1027 with primers f2 T2A 63, f1 T2a Muc, and r pmed Bgl Muc. PCR resulted in the addition of overlapping T2A sequences at the 3′ end of CEA and 5′ end of Muc1. The amplicons were mixed together and cloned into the Nhe I/Bgl II sites of pPJV7563 by Seamless cloning. The open reading frame nucleotide sequence of Plasmid 1410 is set forth in SEQ ID NO:32. The amino acid sequence encoded by Plasmid 1410 is set for in SEQ ID NO:33.

[0605] Plasmid 1411 (mCEA-Furin-T2A-Muc1). Plasmid 1411 was constructed using the techniques of PCR and Seamless cloning. First, the gene encoding CEA amino acids 2-144, 323-702 was amplified by PCR from plasmid 1386 with primers f pmed CEA SS and r T2A furin CEA. The gene encoding human Mucin-1 amino acids 2-225, 946-1255 was amplified by PCR from plasmid 1027 with primers f2 T2A 63, f1 T2a Muc, and r pmed Bgl Muc. PCR resulted in the addition of overlapping furin cleavage site and T2A sequences at the 3′ end of CEA and 5′ end of Muc1. The amplicons were mixed together and cloned into the Nhe I/Bgl II sites of pPJV7563 by Seamless cloning. The open reading frame nucleotide sequence of Plasmid 1411 is set forth in SEQ ID NO:34. The amino acid sequence encoded by Plasmid 1411 is set for in SEQ ID NO:35.

[0606] Plasmid 1431 (Muc1-EMC2A-cCEA).

[0607] Plasmid 1431 was constructed using the techniques of PCR and Seamless cloning. First, the gene encoding human Mucin-1 amino acids 2-225, 946-1255 was amplified by PCR from plasmid 1027 with primers f pmed Nhe Muc and r EM2A Bamh Muc. The gene encoding CEA amino acids 35-144, 323-677 was amplified by PCR from plasmid 1390 with primers f2 EMCV2A, f EMC2a CEA d1, and r pmed CEA D7. PCR resulted in the addition of overlapping EMCV 2A sequences at the 5′ end of CEA and 3′ end of Muc1. The amplicons were mixed together and cloned into the Nhe I/Bgl II sites of pPJV7563 by Seamless cloning. The open reading frame nucleotide sequence of Plasmid 1431 is set forth in SEQ ID NO:36. The amino acid sequence encoded by Plasmid 1431 is set for in SEQ ID NO:37.

[0608] Plasmid 1432 (cCEA-T2A-Tert240). Plasmid 1432 was constructed using the techniques of PCR and Seamless cloning. First, the gene encoding the CEA amino acids 35-144, 323-677 was amplified by PCR from plasmid 1390 with primers f pmed CEA D1 and r T2a CEA D7. The gene encoding human telomerase amino acids 241-1132 was amplified by PCR from plasmid 1112 with primers f2 T2A 63, f1 T2A Tert240, and r pmed Bgl Ter240. The PCR resulted in the addition of overlapping TAV 2A sequences at the 5′ end of Tert and 3′ end of CEA. The amplicons were mixed together and cloned into the Nhe I/Bgl II sites of pPJV7563 by Seamless cloning. The open reading frame nucleotide sequence of Plasmid 1432 is set forth in SEQ ID NO:38. The amino acid sequence encoded by Plasmid 1432 is set for in SEQ ID NO:39.

[0609] Plasmid 1440 (Tert240-ERA2A-mCEA). Plasmid 1440 was constructed using the techniques of PCR and Seamless cloning. First, the gene encoding human telomerase amino acids 241-1132 was amplified by PCR from plasmid 1112 with primers f pmed Nhe tert240 and r ERA2A Tert. The gene encoding CEA amino acids 2-144, 323-702 was amplified by PCR from plasmid 1386 with primers f2 ERAV2A, f1 ERA2A ssCEA, and r pmed CEA GPI. The PCR resulted in the addition of overlapping ERAV 2A sequences at the 3′ end of Tert and 5′ end of CEA. The amplicons were mixed together and cloned into the Nhe I/Bgl II sites of pPJV7563 by Seamless cloning. The open reading frame nucleotide sequence of Plasmid 1440 is set forth in SEQ ID NO:40. The amino acid sequence encoded by Plasmid 1440 is set for in SEQ ID NO:41.

[0610] 1C. Plasmids Containing a Triple-Antigen Construct

[0611] Plasmid 1424 (Muc1-ERB2A-Tert240-ERA2A-mCEA). Plasmid 1424 was constructed using the techniques of PCR and Seamless cloning. First, the genes encoding human Mucin-1 amino acids 2-225, 946-1255, an ERBV 2A peptide, and the amino terminal half of human Tert240 were amplified by PCR from plasmid 1270 with primers f pmed Nhe Muc and r tert 1602-1579. The genes encoding the carboxy terminal half of Tert240, an ERAV 2A peptide, and human CEA amino acids 2-144, 323-702 were amplified by PCR from plasmid 1440 with primers f tert 1584-1607 and r pmed CEA GPI. The partially overlapping amplicons were digested with Dpn I, mixed together, and cloned into the Nhe I/Bgl II sites of pPJV7563 by Seamless cloning. The open reading frame nucleotide sequence of Plasmid 1424 is set forth in SEQ ID NO:42. The amino acid sequence encoded by Plasmid 1424 is set for in SEQ ID NO:43.

[0612] Plasmid 1425 (mCEA-T2A-Muc1-ERB2A-Tert240). Plasmid 1425 was constructed using the techniques of PCR and Seamless cloning. First, the genes encoding human CEA amino acids 2-144, 323-702, a TAV 2A peptide, and the amino terminal half of human Mucin-1 were amplified by PCR from plasmid 1410 with primers f pmed CEA SS and r muc 986-963. The genes encoding the carboxy terminal half of human Mucin-1, an ERBV 2A peptide, and human telomerase amino acids 241-1132 were amplified by PCR from plasmid 1270 with primers f Muc 960-983 and r pmed Bgl Ter240. The partially overlapping amplicons were digested with Dpn I, mixed together, and cloned into the Nhe I/Bgl II sites of pPJV7563 by Seamless cloning. The open reading frame nucleotide sequence of Plasmid 1425 is set forth in SEQ ID NO:44. The amino acid sequence encoded by Plasmid 1425 is set for in SEQ ID NO:45.

[0613] Plasmid 1426 (Tert240-ERB2A-Muc1-EMC2A-mCEA). Plasmid 1426 was constructed using the techniques of PCR and Seamless cloning. First, the genes encoding human telomerase amino acids 241-1132, an ERBV 2A peptide, and the amino terminal half of human Mucin-1 were amplified by PCR from plasmid 1271 with primers f pmed Nhe Ter240 and r muc 986-963. The genes encoding the carboxy terminal half of human Mucin-1, an EMCV 2A peptide, and CEA amino acids 2-144, 323-702 were amplified by PCR from plasmid 1409 with primers f Muc 960-983 and r pmed CEA GPI. The partially overlapping amplicons were digested with Dpn I, mixed together, and cloned into the Nhe I/Bgl II sites of pPJV7563 by Seamless cloning. The open reading frame nucleotide sequence of Plasmid 1426 is set forth in SEQ ID NO:46. The amino acid sequence encoded by Plasmid 1426 is set for in SEQ ID NO:47.

[0614] Plasmid 1427 (Tert240-ERA2A-mCEA-T2A-Muc1). Plasmid 1427 was constructed using the techniques of PCR and Seamless cloning. First, the genes encoding human telomerase amino acids 241-1132, an ERAV 2A peptide, and the amino terminal half of mCEA were amplified by PCR from plasmid 1440 with primers f pmed Nhe Ter240 and R CEA SR2. The genes encoding the carboxy terminal half of mCEA, a TAV 2A peptide, and human Mucin-1 amino acids 2-225, 946-1255 were amplified by PCR from plasmid 1410 with primers f cCEA 562-592 and r pmed Bgl Muc. The partially overlapping amplicons were digested with Dpn I, mixed together, and cloned into the Nhe I/Bgl II sites of pPJV7563 by Seamless cloning. The open reading frame nucleotide sequence of Plasmid 1427 is set forth in SEQ ID NO:48. The amino acid sequence encoded by Plasmid 1427 is set for in SEQ ID NO:49.

[0615] Plasmid 1428 (Muc1-EMC2A-cCEA-T2A-Tert240). Plasmid 1428 was constructed using the techniques of PCR and Seamless cloning. First, the genes encoding human Mucin-1 amino acids 2-225, 946-1255, an EMCV 2A peptide, and the amino terminal half of cCEA were amplified by PCR from plasmid 1431 with primers f pmed Nhe Muc and r cCEA 849-820. The genes encoding the carboxy terminal half of cCEA, a TAV 2A peptide, and human telomerase amino acids 241-1132 were amplified by PCR from plasmid 1432 with primers f CEA 833-855 and r pmed Bgl Ter240. The partially overlapping amplicons were digested with Dpn I, mixed together, and cloned into the Nhe I/Bgl II sites of pPJV7563 by Seamless cloning. The open reading frame nucleotide sequence of Plasmid 1428 is set forth in SEQ ID NO:50. The amino acid sequence encoded by Plasmid 1428 is set for in SEQ ID NO:51.

[0616] Plasmid 1429 (cCEA-T2A-Tert240-ERB2A-Muc1). Plasmid 1429 was constructed using the techniques of PCR and Seamless cloning. First, the genes encoding human CEA amino acids 35-144, 323-677, a TAV 2A peptide, and the amino terminal half of human Tert240 were amplified by PCR from plasmid 1432 with primers f pmed CEA D1 and r tert 1602-1579. The genes encoding the carboxy terminal half of human Tert240, an ERBV 2A peptide, and human Mucin-1 amino acids 2-225, 946-1255 were amplified by PCR from plasmid 1271 with primers f tert 1584-1607 and r pmed Bgl Muc. The partially overlapping amplicons were digested with Dpn I, mixed together, and cloned into the Nhe I/Bgl II sites of pPJV7563 by Seamless cloning. The open reading frame nucleotide sequence of Plasmid 1429 is set forth in SEQ ID NO:52. The amino acid sequence encoded by Plasmid 1429 is set for in SEQ ID NO:53.

[0617] 1D. Vector Construction

[0618] This example illustrates the construction of vectors carrying a multi-antigen construct. Vectors carrying the same triple-antigen construct (open reading frame) as that carried by each of plasmids 1424, 1425, 1426, 1427, 1428, and 1429 were constructed from chimpanzee adenovirus AdC68 genomic sequences as described in international patent application publication WO2015/063647. These vectors are referred to as AdC68Y-1424, AdC68Y-1425, AdC68Y-1426, AdC68Y-1427, AdC68Y-1428, and AdC68Y-1429, respectively. The organizations of these vectors are provided in FIG. 1.

[0619] The full length genomic sequence of AdC68 is available from Genbank having Accession Number AC_000011.1 and is also provided in WO2015/063647. The AdC68 backbone without transgenes (the “empty vector”) was designed in silico with E1 and E3 deletions engineered into the virus to render it replication incompetent and create space for transgene insertion. Vector AdC68Y, having deletions of bases 456-3256 and 27476-31831, was engineered to have improved growth properties over previous AdC68 vectors. The empty vector was biochemically synthesized in a multi-stage process utilizing in vitro oligo synthesis and subsequent recombination-mediated intermediate assembly as artificial chromosomes in Escherichia coli (E. coli) and/or yeast. Open reading frames encoding the various immunogenic TAA polypeptides were amplified by PCR from plasmids 1424, 1425, 1426, 1427, 1428, and 1429 using primer sets Muc1-20 bp-F-98/mCEA-20 bp-R-100, Y-mCEA-S2/Y-Tert-A2, Y-Tert-S/Y-CEA-A, Y-Tert-S/Y-MUC-A, Y-MUC-S2/Y-Tert-A2, and cCEA-20 bp-F-106/Muck 20BP-R-108, respectively. The amplicons were then inserted into the empty vector backbone. Recombinant viral genomes were released from the bacterial artificial chromosomes by digestion with Pacl and the linearized nucleic acids were transfected into an E1 complimenting adherent HEK293 cell line. Upon visible cytopathic effects and adenovirus foci formation, cultures were harvested by multiple rounds of freezing/thawing to release virus from the cells. Viruses were amplified and purified by standard techniques.

### Example 2. Immunogenicity of Muc1 Single-Antigen Constructs

[0620] Study in HLA-A2/DR1 Mice

[0621] Study Design.

[0622] Twelve mixed gender HLA-A2/DR1 mice were primed on day 0 and boosted on day 14 with DNA construct Plasmid 1027 (which encodes the membrane-bound immunogenic MUC1 polypeptide of SEQ ID NO:5) or Plasmid 1197 (which encodes the cytosolic immunogenic MUC1 polypeptide of SEQ ID NO:7) using the PMED method. On day 21, mice were sacrificed and splenocytes assessed for MUC1-specific cellular immunogenicity in an interferon-gamma (IFN-γ) ELISpot and intracellular cytokine staining (ICS) assay.

[0623] Particle Mediated Epidermal Delivery (PMED).

[0624] PMED is a needle-free method of administering vaccines to animals or to patients. The PMED system involves the precipitation of DNA onto microscopic gold particles that are then propelled by helium gas into the epidermis. The ND10, a single use device, uses pressurized helium from an internal cylinder to deliver gold particles and the X15, a repeater delivery device, uses an external helium tank which is connected to the X15 via high pressure hose to deliver the gold particles. Both of these devices were used in studies to deliver the MUC1 DNA plasmids. The gold particle was usually 1-3 μm in diameter and the particles were formulated to contain 2 μg of antigen DNA plasmids per 1 mg of gold particles. (Sharpe, M. et al.: P. Protection of mice from H5N1 influenza challenge by prophylactic DNA vaccination using particle mediated epidermal delivery. Vaccine, 2007, 25(34): 6392-98: Roberts L K, et al.: Clinical safety and efficacy of a powdered Hepatitis B nucleic acid vaccine delivered to the epidermis by a commercial prototype device. Vaccine, 2005; 23(40):4867-78).

[0625] IFN-γ ELISpot Assay.

[0626] Splenocytes from individual animals were co-incubated in triplicate with individual Ag-specific peptides (each peptide at 2-10 ug/ml, 2.5-5e5 cells per well) or pools of 15mer Ag-specific peptides (overlapping by 11 amino acids, covering the entire Ag-specific amino acid sequence; see Table 15; each peptide at 2-5 ug/ml, 1.25-5e5 cells per well) in IFN-γ ELISpot plates. The plates were incubated for ˜16 hours at 37° C., 5% CO₂, then washed and developed, as per manufacturer's instruction. The number of IFN-γ spot forming cells (SFC) was counted with a CTL reader. The average of the triplicates was calculated and the response of the negative control wells, which contained no peptides, subtracted. The SFC counts were then normalized to describe the response per 1e6 splenocytes. The antigen-specific responses in the tables represent the sum of the responses to the Ag-specific peptides or peptide pools.

[0627] ICS Assay.

[0628] Splenocytes from individual animals were co-incubated with H-2b-, HLA-A2-, or HLA-A24-restricted Ag-specific peptides (each peptide at 5-10 ug/ml, 1-2e6 splenocytes per well) or pools of 15mer Ag-specific peptides (overlapping by 11 amino acids, covering the entire Ag-specific amino acid sequence; see Table 15; each peptide at 2-5 ug/ml, 1-2e6 splenocytes per well) in U-bottom 96-well-plate tissue culture plates. The plates were incubated ˜16 hrs at 37° C., 5% CO₂. The cells were then stained to detect intracellular IFN-γ expression from CD8⁺ T cells and fixed. Cells were acquired on a flow cytometer. The data was presented per animal as frequency of peptide(s) Ag- or peptide pool Ag-specific IFN-γ⁺ CD8⁺ T cells after subtraction of the responses obtained in the negative control wells, which contained no peptide.

[0629] Sandwich ELISA Assay.

[0630] The standard sandwich ELISA assay was done using the Tecan Evo, Biomek Fx^{P}, and BioTek 405 Select TS automation instruments. The 384 well microplates (flat-well, high binding) were coated at 25 μl/well with 1.0 μg/mL human MUC1 or human CEA protein (antigen) in 1×PBS, and incubated overnight at 4° C. The next morning, plates were blocked for one hour at RT with 5% FBS in PBS with 0.05% Tween 20 (PBS-T). Mouse serum was prepared at a 1/100 starting dilution in PBS-T in 96 U-bottom well plates. The Tecan Evo performed ½ log serial dilutions in PBS-T over 9 dilution increment points, followed by stamping of 25 μl/well of diluted serum from the 96 well plates to 384 well plates. The 384 well plates were incubated for 1 hour at RT on a shaker at 600 RPM, then, using the BioTek EL 405 Select TS plate washer, the plates were washed 4 times in PBS-T. Secondary mouse anti-IgG-HRP antibody was diluted to an appropriate dilution and stamped by Biomek Fx^{P} at 25 μl/well into 384 well plates, and incubated for 1 hour at RT on a shaker at 600 RPM, followed by 5 repeated washes. Using the Biomek Fx^{P}, plates were stamped at 25 μl/well of RT TMB substrate and incubated in the dark at RT for 30 minutes, followed by 25 μl/well stamping of 1N H₂SO₄ acid to stop the enzymatic reaction. Plates were read on the Molecular Devices, Spectramax 340PC/384 Plus at 450 nm wavelength. Data were reported as calculated titers at OD of 1.0 with a limit of detection of 99.0. The antigen-specific commercial monoclonal antibody was used in each plate as a positive control to track plate-to-plate variation performance; irrelevant vaccinated mouse serum was used as a negative control, and PBS-T only wells were used to monitor non-specific binding background. Titers in the tables represent antigen-specific IgG titers elicited from individual animals.

[0631] Results.

[0632] Table 1 shows ELISpot and ICS data from HLA-A2/DR1 splenocytes cultured with peptide pools derived from the MUC1 peptide library (see Table 15) or MUC1 peptide aa516-530, respectively. Numbers in column 3 represent # IFN-γ spots/10⁶ splenocytes after restimulation with MUC1 peptide pools, and background subtraction. Numbers in column 4 represent the frequency of CD8⁺ T cells being IFN-γ⁺ after restimulation with MUC1 peptide aa516-530 and background subtraction. A positive response is defined as having SFC>100 and a frequency of IFN-γ⁺ CD8⁺ T cells>0.1%. As shown in Table 1, the immunogenic MUC1 polypeptides made with the full-length membrane-bound (Plasmid 1027) and cytosolic (Plasmid 1197) MUC1 constructs were capable of inducing MUC1-specific T cell responses including HLA-A2-restricted MUC1 peptide aa516-530-specific CD8⁺ T cell responses. The cytosolic MUC1 antigen format induced the highest magnitude of T cell responses. Importantly, T cell responses derived from cancer patients against the MUC1 peptide aa516-530 have been shown to correlate with anti-tumor efficacy in vitro (Jochems C et al., Cancer Immunol Immunother (2014) 63:161-174) demonstrating the importance of raising cellular responses against this specific epitope.

TABLE 1
T cell response induced by the single-antigen MUC1 DNA constructs
(Plasmid 1027 and Plasmid 1197) in HLA-A2/DR1 mice

| | | # IFN-γ spots/ | % CD8⁺ T cells |
|---|---|---|---|
| Construct ID | Animal # | 10⁶ splenocytes | being IFN-γ⁺ |
| Plasmid 1027 | 31 | 494 | 2.25 |
| | 32 | 277 | 1.44 |
| | 33 | 475 | 0.10 |
| | 34 | 1096 | 0.84 |
| | 35 | 282 | 1.45 |
| | 36 | 649 | 1.36 |
| Plasmid 1197 | 43 | 569 | 4.69 |
| | 44 | 1131 | 2.15 |
| | 45 | 122 | 2.81 |
| | 46 | 373 | 1.73 |
| | 47 | 503 | 1.80 |
| | 48 | 2114 | 5.52 |

[0633] Study in HLA-A24 Mice

[0634] Study design. Mixed gender HLA-A24 mice were primed on day 0 and boosted on days 14, 28 and 42 with DNA construct Plasmid 1027 by PMED administration. On day 21, mice were sacrificed and splenocytes assessed for MUC1-specific cellular immunogenicity (ELISpot).

[0635] Results.

[0636] Table 2 shows ELISpot data from HLA-A24 splenocytes cultured with peptide pools derived from the MUC1 peptide library (see Table 15). Numbers in column 3 represent # IFN-γ spots/10⁶ splenocytes after restimulation with MUC1 peptide pools and background subtraction. The number in bold font indicates that at least 1 peptide pool tested was too numerous to count, therefore the true figure is at least the value stated. A positive response is defined as having SFC>100. As shown in Table 2, membrane-bound MUC1 construct was capable of inducing MUC1-specific cellular responses.

TABLE 2
T cell response induced by the single-antigen DNA
construct Plasmid 1027 encoding human native full-
length membrane-bound MUC1 antigen in HLA-A24 mice

| | | # IFN-γ spots/ |
|---|---|---|
| Construct ID | Animal # | 10⁶ splenocytes |
| Plasmid 1027 | 8 | 3341 |
| | 9 | 3181 |
| | 10 | 6207 |
| | 11 | 3112 |
| | 12 | 3346 |
| | 13 | 3699 |

[0637] Study in Monkeys

[0638] Study Design.

[0639] 14 Chinese-sourced cynomolgus macaques were primed with an adenovirus vector AdC68W encoding the cytosolic MUC1 polypeptide (same polypeptide as encoded by Plasmid 1197) or full-length membrane-bound MUC1 polypeptide (same polypeptide as encoded by Plasmid 1027) at 2e11 viral particles by bilateral intramuscular injection (1 mL total). 29 days later, animals were boosted with Plasmid 1197 or Plasmid 1027 delivered intramuscularly bilaterally via electroporation (2 mL total). Anti-CTLA-4 was administered subcutaneously on days 1 (32 mg) and 29 (50 mg). 14 days after the last immunization, animals were bled and PBMCs and sera isolated to assess MUC1-specific cellular (ELISpot, ICS) and humoral (ELISA) responses, respectively. The adenovirus vector AdC68W used in this and other examples of the present disclosure was constructed from the chimpanzee adenovirus AdC68 according to the method described in international patent application WO2015/063647. NHP-specific immune assays.

[0640] EL/Spot Assay.

[0641] PBMCs from individual animals were co-incubated in duplicate with pools of 15mer Ag-specific peptides (overlapping by 11 amino acids, covering the entire Ag-specific amino acid sequence), each peptide at 2 ug/ml, 4e5 cells per well, in IFN-γ ELISpot plates (see Table 15). The plates were incubated for ˜16 hrs at 37° C., 5% CO₂, then washed and developed, as per manufacturers instruction. The number of IFN-γ spot forming cells (SFC) was counted with a CTL reader. The average of the duplicates was calculated and the response of the negative control wells, which contained no peptides, subtracted. The SFC counts were then normalized to describe the response per 1e6 PBMCs. The antigen-specific responses in the tables represent the sum of the responses to the Ag-specific peptide pools.

[0642] ICS Assay.

[0643] PBMCs from individual animals were co-incubated with pools of 15mer MUC1 peptides (overlapping by 11 amino acids, covering the entire native full-length MUC1 amino acid sequence; see Table 15), each peptide at 2 ug/mL, 1.5-2e6 PBMCs per well, in U-bottom 96-well-plate tissue culture plates. The plates were incubated for ˜16 hours at 37° C., 5% CO₂, and then stained to detect intracellular IFN-γ expression from CD8 T cells. After fixation, the cells were acquired on a flow cytometer. The results are presented per individual animal as number of MUC1, CEA, or TERT-specific IFN-γ⁺ CD8⁺ T cells after subtraction of the responses obtained in the negative control wells, which contained no peptide, and normalized to 1e6 CD8⁺ T cells.

[0644] Sandwich ELISA Assay.

[0645] The standard sandwich ELISA assay was done using the Tecan Evo, Biomek Fx^{P}, and BioTek 405 Select TS automation instruments. The 384 well microplates (flat-well, high binding) were coated at 25 μl/well with 1.0 μg/mL human MUC1 or human CEA protein (antigen) in 1×PBS, and incubated overnight at 4° C. The next morning, plates were blocked for one hour at RT with 5% FBS in PBS with 0.05% Tween 20 (PBS-T). Sera from Chinese-sourced cynomolgus macaques were prepared at a 1/100 starting dilution in PBS-T in 96 U-bottom well plates. The Tecan Evo performed ½ log serial dilutions in PBS-T over 9 dilution increment points, followed by stamping of 25 μl/well of diluted serum from the 96 well plates to 384 well plates. The 384 well plates were incubated for 1 hour at RT on a shaker at 600 RPM, then, using the BioTek EL 405 Select TS plate washer, the plates were washed 4 times in PBS-T. Secondary rhesus anti-IgG-HRP antibody, which cross-reacts with cynomolgus IgG, was diluted to an appropriate dilution and stamped by Biomek Fx^{P} at 25 μl/well into 384 well plates, and incubated for 1 hour at RT on a shaker at 600 RPM, followed by 5 repeated washes. Using the Biomek Fx^{P}, plates were stamped at 25 μl/well of RT TMB substrate and incubated in the dark at RT for 30 minutes, followed by 25 μl/well stamping of 1N H₂SO₄ acid to stop the enzymatic reaction. Plates were read on the Molecular Devices, Spectramax 340PC/384 Plus at 450 nm wavelength. Data were reported as calculated titers at OD of 1.0 with a limit of detection of 99.0. The antigen-specific commercial monoclonal antibody was used in each plate as a positive control to track plate-to-plate variation performance; irrelevant vaccinated mouse serum was used as a negative control, and PBS-T only wells were used to monitor non-specific binding background. Titers in the tables represent antigen-specific IgG titers elicited from individual animals.

[0646] Results.

[0647] Table 3 shows the ELISpot and ICS data from Chinese-sourced cynomolgus macaque PBMCs cultured with peptide pools derived from the MUC1 peptide library (Table 15), and the ELISA data from Chinese-sourced cynomolgus macaque sera. Numbers in column 3 represent # IFN-γ spots/10⁶ PBMCs after restimulation with MUC1 peptide pools and background subtraction. Numbers in column 4 represent # IFN-γ⁺ CD8⁺ T cells/10⁶ CD8⁺ T cells after restimulation with MUC1 peptide pools and background subtraction. Numbers in column 5 represent the anti-MUC1 IgG titer (Optical Density (O.D)=1, Limit of Detection (L.O.D)=99.0). A positive response is defined as having SFC>50, IFN-γ⁺ CD8⁺ T cells/1e6 CD8⁺ T cells>50, and IgG titers>99. As shown in Table 3, the immunogenic MUC1 polypeptides made with the cytosolic (Plasmid 1197) and native full-length membrane-bound (Plasmid 1027) MUC1 constructs were capable of inducing MUC1-specific T and B cell responses. The native full-length membrane-bound MUC1 construct (Plasmid 1027) was shown to induce the overall best MUC1-specific cellular and humoral response.

TABLE 3
T and B cell responses induced by the single-antigen adenoviral
AdC68W vector and single-antigen DNA constructs (Plasmid 1197;
Plasmid 1027) in Chinese-sourced cynomolgus macaques

| | | # IFN-γ | # IFN-γ⁺ CD8⁺ | |
|---|---|---|---|---|
| Construct ID | | spots/10⁶ | T cells/1e6 | |
| # | Animal # | splenocytes | CD8⁺ T cells | IgG titer |
| Plasmid 1197 | 4001 | 0 | 0.0 | 8589.7 |
| | 4002 | 38 | 1549.0 | 4245.9 |
| | 4003 | 17 | 0.0 | 2631.9 |
| | 4501 | 165 | 4792.3 | 614.6 |
| | 4502 | 1703 | 47727.4 | 1882.8 |
| | 4503 | 0 | 802.8 | 4366.4 |
| | 4504 | 373 | 1857.0 | 4419.3 |
| Plasmid 1027 | 5001 | 797 | 813.5 | 5332.2 |
| | 5002 | 1013 | 312.9 | 16233.5 |
| | 5003 | 1011 | 9496.9 | 6885.8 |
| | 5004 | 175 | 170.2 | 48759.0 |
| | 5501 | 214 | 4803.3 | 13010.4 |
| | 5502 | 306 | 8367.6 | 13115.3 |
| | 5503 | 405 | 0.0 | 89423.0 |

### Example 3. Immunogenicity of CEA Single-Antigen Constructs

[0648] Immune Response Study in Pasteur (HLA-A2/DR 1) Mice

[0649] Study Design.

[0650] Mixed gender HLA-A2/DR1 mice were primed on day 0 and boosted on day 14 with a plasmid carrying a single-antigen construct encoding the human membrane-bound (Plasmid 1386) or cytosolic CEA polypeptide (Plasmid 1390) by electroporation. The antigen-specific T cell response was measured seven days later in an IFN-γ ELISpot and ICS assay.

[0651] Results.

[0652] Table 4 shows ELISpot and ICS data from HLA-A2/DR1 splenocytes cultured with peptide pools derived from the CEA peptide library composed of aa1-699 for mice immunized with construct 1386, and aa37-679 (removal of signal sequence and GPI sequence) for mice immunized with Plasmid 1390 (see also Table 15). Numbers in columns 3 and 4 represent # IFN-γ⁺ spots/1e6 splenocytes and the frequency of IFN-γ⁺ CD8⁺ T cells respectively, elicited after restimulation with relevant CEA peptides pools and background subtraction Table 5 shows ELISpot data from HLA-A2/DR1 splenocytes cultured with the CEA peptide aa693-701. A positive response is defined as having SFC>100 and a frequency of IFN-γ⁺ CD8⁺ T cells>0.1%. As shown in Table 4, the immunogenic CEA polypeptides made with the membrane-bound (Plasmid 1386) and cytosolic (Plasmid 1390) CEA constructs described in Example 1A above were capable of inducing CEA-specific T cell responses. Comparable magnitudes of CEA-specific T cell responses were induced by both membrane-bound and cytosolic CEA antigen formats. As shown in Table 5, immunization with the membrane-bound construct 1386 induced an HLA-A2 restricted T cell response against CEA peptide aa693-701, which has been shown in the literature to be processed and presented by HLA-A2 (Conforti A et al., J Immunother (2009) 32:744-754).

TABLE 4
T cell response induced by the single-antigen DNA constructs
(Plasmids 1386 and 1390) encoding human membrane-bound
or human cytosolic CEA polypeptide in HLA-A2/DR1 mice

| | | # IFN-γ spots/ | % CD8⁺ T cells |
|---|---|---|---|
| Construct ID | Animal # | 10⁶ splenocytes | being IFN-γ⁺ |
| Plasmid 1386 | 25 | 332 | 0.57 |
| | 26 | 359 | 0.50 |
| | 27 | 579 | 2.78 |
| | 28 | 1525 | 6.80 |
| | 29 | 2435 | 0.31 |
| | 30 | 321 | 0.12 |
| | 31 | 609 | Not determined |
| | 32 | 229 | Not determined |
| Plasmid 1390 | 17 | 381 | 0.85 |
| | 18 | 1035 | 0.75 |
| | 19 | 631 | 1.01 |
| | 20 | 1811 | 10.11 |
| | 21 | 289 | 1.03 |
| | 22 | 157 | 0.56 |
| | 23 | 267 | Not determined |
| | 24 | 1329 | Not determined |

TABLE 5
HLA-A2-restricted CEA peptide aa693-701-specific
T cell responses induced by single antigen DNA
construct encoding human membrane-bound CEA polypeptide
(Plasmid 1386; mCEA) in HLA-A2 mice

| | | # IFN-γ spots/ |
|---|---|---|
| Construct ID | Animal # | 10⁶ splenocytes |
| Plasmid 1386 | 25 | 397 |
| | 26 | 1279 |
| | 27 | 1658 |
| | 28 | 695 |
| | 29 | 677 |
| | 30 | 239 |
| | 31 | 593 |
| | 32 | 578 |

[0653] Immune Response Study in HLA A24 Mice

[0654] Study Designs.

[0655] Sixteen mixed-gender HLA-A24 mice were primed on day 0 and boosted on day 14 with human membrane-bound (Plasmid 1386) or cytosolic CEA (Plasmid 1390) DNA constructs via DNA electroporation. CEA-specific T cell responses were measured 7 days after the last immunization in an IFN-γ ELISpot and ICS assay.

[0656] Results.

[0657] Table 6 shows ELISpot and ICS data from HLA-A24 splenocytes cultured with peptide pools derived from the CEA peptide library (see also Table 15). Numbers in column 3 represent # IFN-γ spots/10⁶ splenocytes after restimulation with CEA peptide pools encompassing aa1-699 and background subtraction. Numbers in column 4 represent the frequency of CD8⁺ T cells being IFN-γ⁺ after restimulation with CEA peptide pools encompassing aa37-679, and background subtraction. A positive response is defined as having SFC>100 and a frequency of IFN-γ⁺ CD8⁺ T cells>0.1%. The number in bold font indicates that at least 1 peptide pool tested was too numerous to count, therefore the true figure is at least the value stated. As shown in Table 6, the immunogenic CEA polypeptides made with the membrane-bound (Plasmid 1386) and cytosolic CEA (Plasmid 1390) constructs were capable of inducing comparable CEA-specific cellular responses as measured via ELISpot. Vaccination with the cytosolic CEA construct (Plasmid 1390), however, induced higher CEA-specific IFN-γ⁺ CD8⁺ T cell responses measured via ICS.

TABLE 6
T cell response induced by the single-
antigen DNA constructs in HLA-A24 mice

| | | # IFN-γ spots/ | % CD8⁺ T cells |
|---|---|---|---|
| Construct ID | Animal # | 10⁶ splenocytes | being IFN-γ⁺ |
| Plasmid 1386 | 25 | 3037 | 0.19 |
| | 26 | 3412 | −0.26 |
| | 27 | 2385 | 1.48 |
| | 28 | 2293 | 0.62 |
| | 29 | 1845 | −0.27 |
| | 30 | 2611 | 0.07 |
| | 31 | 3534 | Not determined |
| | 32 | 1985 | Not determined |
| Plasmid 1390 | 17 | 2345 | 7.67 |
| | 18 | 1357 | 17.48 |
| | 19 | 3723 | 16.41 |
| | 20 | 3081 | 41.30 |
| | 21 | 3031 | 18.24 |
| | 22 | 1531 | 0.73 |
| | 23 | 2786 | Not determined |
| | 24 | 1419 | Not determined |

### Example 4. Immunogenicity of Tert Single-Antigen Constructs

[0658] Immune Responses Study in HLA-A2/DR1 Mice

[0659] Study Design.

[0660] Six mixed gender HLA-A2/DR1 mice were primed with an AdC68W adenovirus vector encoding the truncated (Δ240) cytosolic immunogenic TERT polypeptide (Plasmid 1112) at 1e10 viral particles by intramuscular injection (50 ul). 28 days later, animals were boosted intramuscularly with 50 ug DNA delivered bilaterally via electroporation (2×20 ul) encoding the truncated (Δ240) cytosolic TERT antigen (Plasmid 1112). The antigen-specific T cell response was measured seven days later in an IFN-γ ELISpot and ICS assay.

[0661] Results.

[0662] Table 7 shows ELISpot and ICS data from HLA-A2/DR1 splenocytes cultured with peptide pools derived from the TERT peptide library (see also Table 15) or TERT peptide aa861-875, respectively. Numbers in column 3 represent # IFN-γ spots/10⁶ splenocytes after restimulation with TERT peptide pools and background subtraction. Numbers in column 4 represent the frequency of CD8⁺ T cells being IFN-γ⁺ after restimulation with TERT peptide aa861-875 and background subtraction. A positive response is defined as having SFC>100 and a frequency of IFN-γ⁺ CD8⁺ T cells>0.1%. As shown in Table 7, the immunogenic TERT polypeptide made with the truncated (Δ240) cytosolic TERT construct was capable of inducing HLA-A2-restricted TERT-specific CD8 T cell responses.

TABLE 7
T cell response induced by the single-antigen adenoviral AdC68W
and single-antigen DNA constructs (Plasmid 1112) encoding human
truncated (Δ240) cytosolic TERT antigen in HLA-A2/DR1 mice

| | | # IFN-γ spots/ | % CD8⁺ T cells |
|---|---|---|---|
| Construct ID | Animal # | 10⁶ splenocytes | being IFN-γ⁺ |
| Plasmid 1112 | 13 | 2851 | 32.79 |
| | 14 | 2691 | 13.60 |
| | 15 | 3697 | 7.87 |
| | 16 | 2984 | 21.30 |
| | 17 | 1832 | 26.40 |
| | 18 | 1385 | 3.16 |

[0663] Immune Responses Study in HLA-A24 Mice

[0664] Study Designs.

[0665] Eight mixed gender HLA-A24 mice were primed with an AdC68W adenovirus vector encoding the truncated (Δ240) cytosolic TERT polypeptide (same polypeptide as encoded by Plasmid 1112) at 1e10 viral particles total by bilateral intramuscular injection (50 ul into each tibialis anterior muscle). 14 days later, animals were boosted intramuscularly with 50 ug DNA (Plasmid 1112) delivered bilaterally via electroporation (2×20 ul) encoding the truncated (Δ240) cytosolic TERT polypeptide. The antigen-specific T cell response was measured seven days later in an IFN-γ ELISpot and ICS assay.

[0666] Results.

[0667] Table 8 shows IFN-γ ELISpot and ICS data from HLA-A24 splenocytes cultured with peptide pools derived from the TERT peptide library (see also Table 15) or TERT peptide aa841-855), respectively. Numbers in column 3 represent # IFN-γ spots/10⁶ splenocytes after restimulation with TERT peptide pools and background subtraction. Numbers in column 4 represent the frequency of CD8⁺ T cells being IFN-γ⁺ after restimulation with TERT peptides aa841-855, and background subtraction. Numbers in bold font indicate that at least 1 peptide pool tested was too numerous to count, therefore the true figure is at least the value stated. A positive response is defined as having SFC>100 and a frequency of IFN-γ⁺ CD8⁺ T cells>0.1%. As shown in Table 8, the immunogenic TERT polypeptide made with the truncated (Δ240) cytosolic TERT (Plasmid 1112) construct is capable of inducing HLA-A24-restricted TERT-specific CD8⁺ T cell responses.

TABLE 8
T cell response induced by the single-antigen adenoviral AdC68W
vector and single-antigen DNA constructs (Plasmid 1112) encoding
human truncated (Δ240) cytosolic TERT antigen in HLA-A24 mice

| | | # IFN-γ spots/ | % CD8⁺ T cells |
|---|---|---|---|
| Construct ID | Animal # | 10⁶ splenocytes | being IFN-γ⁺ |
| Plasmid 1112 | 17 | 4233 | 41.5 |
| | 18 | 2643 | 3.34 |
| | 19 | 1741 | 31.5 |
| | 20 | 3407 | 3.05 |
| | 21 | 3213 | 0.0903 |
| | 22 | 596 | 0 |
| | 23 | 1875 | 13.8 |
| | 24 | 2011 | 19.8 |

[0668] Immune Responses Study in Monkeys

[0669] Study Design.

[0670] Eight Chinese-sourced cynomolgus macaques were primed with an AdC68W adenovirus vector encoding the truncated (A240) cytosolic TERT antigen (Plasmid 1112) at 2e11 viral particles by bilateral intramuscular injection (1 mL total). 30 and 64 days later, animals were boosted with DNA (Plasmid 1112) encoding truncated (Δ240) cytosolic TERT antigen delivered intramuscularly bilaterally via electroporation (2 mL total). Anti-CTLA-4 was administered subcutaneously on days 1 (32 mg), 31 (50 mg) and 65 (75 mg). 14 days after the last immunization, animals were bled and PBMCs isolated to assess TERT-specific cellular (ELISpot, ICS) responses.

[0671] Results.

[0672] Table 9 shows the ELISpot and ICS data from Chinese-sourced cynomolgus macaques' PBMCs cultured with peptide pools derived from the TERT peptide library (see also Table 15). Numbers in column 3 represent # IFN-γ spots/10⁶ splenocytes after restimulation with TERT peptide pools and background subtraction. Numbers in column 4 represent # IFN-γ⁺ CD8⁺ T cells/10⁶ CD8⁺ T cells after restimulation with TERT peptide pools and background subtraction. A positive response is defined as having SFC>50 and IFN-γ⁺ CD8⁺ T cells/1e6 CD8⁺ T cells>50. As shown in Table 9, the immunogenic TERT polypeptide made with the truncated (A240) cytosolic (Plasmid 1112) TERT construct was capable of inducing TERT-specific T cell responses.

TABLE 9
T cell response induced by the TERT single-antigen adenoviral
AdC68W and TERT single-antigen DNA constructs (Plasmid
1112) in Chinese-sourced cynomolgus macaques

| Construct ID | | # IFN-γ spots/ | # IFN-γ⁺ CD8⁺ T cells/ |
|---|---|---|---|
| # | Animal # | 10⁶ splenocytes | 1e6 CD8⁺ T cells |
| Plasmid 1112 | 1001 | 3487 | 29472.2 |
| | 1002 | 1130 | 4906.6 |
| | 1003 | 2077 | 2984.2 |
| | 1004 | 133 | 337.8 |
| | 1501 | 3157 | 5325.1 |
| | 1502 | 2037 | 653.2 |
| | 1503 | 2697 | 16953.4 |
| | 1504 | 1208 | 1178.9 |

### Example 5. Immunogenicity of Dual-Antigen Constructs

[0673] Immune Response Study in Monkeys

[0674] Study Design.

[0675] 24 Chinese-sourced cynomolgus macaques were primed with dual-antigen adenoviral AdC68W vectors encoding human native full-length membrane-bound MUC1 (MUC1) and human truncated (Δ240) cytosolic TERT (TERT_{Δ240}) polypeptides (Plasmids 1270, 1271, and 1269) at 2e11 viral particles by bilateral intramuscular injection (1 mL total). 30 and 64 days later, animals were boosted with dual-antigen DNA constructs (Plasmids 1270, 1271, and 1269) encoding the same two antigens delivered intramuscularly bilaterally via electroporation (2 mL total). Anti-CTLA-4 was administered subcutaneously on days 1 (32 mg), 31 (50 mg) and 65 (75 mg). 14 days after the last immunization, animals were bled and PBMCs and serum isolated to assess MUC1- and TERT-specific cellular (ELISpot, ICS) and MUC1-specific humoral (ELISA) responses, respectively. In total, three different dual-antigen vaccine constructs, which co-expressed both antigens, were evaluated: a) MUC1-2A-TERT_{Δ240} (Plasmid 1270), an AdC68W vector and DNA plasmid encoding MUC1 and TERT linked by a 2A peptide; b) TERT_{Δ240}-2A-MUC1 (Plasmid 1271), an AdC68W vector and DNA plasmid encoding TERT and MUC1 linked by a 2A peptide; c) MUC1-TERT_{Δ240} (Plasmid 1269), an AdC68W vector and DNA plasmid encoding the MUC1-TERT fusion protein.

[0676] Results.

[0677] Table 10 shows the ELISpot and ICS data from Chinese-sourced cynomolgus macaque PBMCs cultured with peptide pools derived from the MUC1 and TERT peptide libraries (see also Table 15), and the ELISA data from Chinese-sourced cynomolgus macaque sera. A positive response is defined as having SFC>50, IFN-γ⁺ CD8⁺ T cells/1e6 CD8⁺ T cells>50, and IgG titers>99. Numbers in columns 3 and 6 represent # IFN-γ spots/10⁶ splenocytes after restimulation with MUC1 and TERT peptide pools and background subtraction, respectively. Numbers in bold font indicate that at least 1 peptide pool tested was too numerous to count, therefore the true figure is at least the value stated. Numbers in columns 4 and 7 represent # IFN-γ⁺ CD8⁺ T cells/10⁶ CD8⁺ T cells after restimulation with MUC1 peptide pools and TERT peptide pools, respectively, and background subtraction. Numbers in column 5 represent the anti-MUC1 IgG titer (Optical Density (O.D)=1, Limit of Detection (L.O.D)=99.0). As shown in Table 10, the immunogenic MUC1 and TERT polypeptides made with the MUC1- and TERT-expressing dual-antigen constructs (Plasmids 1270, 1271, and 1269) were capable of inducing MUC1- and TERT-specific T cell responses, and MUC1-specific B cell responses. The dual-antigen construct 1269 encoding a MUC1-TERT fusion protein was shown to induce the strongest overall MUC1-specific cellular response; in contrast, dual-antigen construct Plasmid 1271 (TERT-2A-MUC1) was shown to induce the strongest overall TERT-specific cellular response. All three dual-antigen constructs were shown to induce a comparable MUC1-specific humoral response.

TABLE 10
T and B cell responses induced by the dual-antigen adenoviral AdC68W and
single-antigen DNA constructs (Plasmid 1270, 1271, and 1269) encoding an
immunogenic MUC1 and TERT polypeptide in Chinese-sourced cynomolgus macaques

| | | MUC1 | | | TERT | |
|---|---|---|---|---|---|---|
| | | | # IFN-γ⁺ | | | # IFN-γ⁺ |
| | | | CD8⁺ T | | | CD8⁺ T |
| | | # IFN-γ | cells/1e6 | | # IFN-γ | cells/ |
| Construct | | spots/10⁶ | CD8⁺ T | | spots/10⁶ | 1e6 CD8⁺ |
| ID | Animal # | splenocytes | cells | IgG titer | splenocytes | T cells |
| Plasmid | 5001 | 813 | 1024.4 | 10725.8 | 307 | 436.9 |
| 1270 | 5002 | 2778 | 14740.6 | 27090.7 | 1573 | 423.0 |
| | 5003 | 217 | 1198.7 | 19339.6 | 1687 | 40680.3 |
| | 5004 | 298 | Excluded | 3980.3 | 252 | 805.3 |
| | 5501 | 2287 | 6255.7 | 16278.9 | 692 | 0.0 |
| | 5502 | 760 | 0.0 | 6496.2 | 3010 | 13302.0 |
| | 5503 | 1315 | 199.8 | 6446.4 | 3702 | 7259.3 |
| | 5504 | 500 | 281.8 | 39868.0 | 2005 | 13727.8 |
| Plasmid | 6001 | 1037 | 0.0 | 11770.3 | 2937 | 63106.1 |
| 1271 | 6002 | 185 | 0.0 | 13925.4 | 1295 | 194.8 |
| | 6003 | 372 | 267.4 | 15439.7 | 2138 | 46023.2 |
| | 6004 | 203 | 97.1 | 10530.7 | 1562 | 8424.0 |
| | 6501 | 1315 | 2137.3 | 43487.3 | 3794 | 20358.2 |
| | 6502 | 1008 | 179.2 | 8742.0 | 2955 | 1503.5 |
| | 6503 | 552 | 226.4 | 35183.4 | 1797 | 50008.6 |
| | 6504 | 2200 | 162.8 | 35539.9 | 4402 | 24058.6 |
| Plasmid | 7001 | 193 | 0.0 | 14868.3 | 3320 | 7321.5 |
| 1269 | 7002 | 1353 | 2153.2 | 7546.6 | 870 | 736.2 |
| | 7003 | 1253 | 133.5 | 21277.4 | 2750 | 25827.7 |
| | 7004 | 1858 | 20846.7 | 10359.9 | 3230 | 19664.0 |
| | 7501 | 2138 | 773.6 | 31272.8 | 927 | 332.0 |
| | 7502 | 2177 | 10547.7 | 16635.5 | 2640 | 7527.3 |
| | 7503 | 1460 | 5086.2 | 5465.1 | 2362 | 938.6 |
| | 7504 | 922 | 0.0 | 38530.4 | 2875 | 2949.3 |

### Example 6. Immunogenicity of Triple-Antigen Constructs

[0678] Example 6 illustrates the capability of plasmid and adenoviral vectors that carry a triple-antigen construct expressing the human native full-length membrane-bound MUC1 polypeptide (MUC1), human membrane-bound or cytosolic CEA polypeptide (mCEA or cCEA), and human truncated (Δ240) cytosolic TERT polypeptide (TERT_{Δ240}) to elicit Ag-specific T and B cell responses to all three encoded cancer antigens.

[0679] Immune Response Study in C57BL/6J Mice Using DNA Electroporation

[0680] Study Design.

[0681] 48 female C57BL/6J mice were immunized with triple-antigen DNA constructs encoding human MUC1, mCEA or cCEA, and TERT_{Δ240}. The triple-antigen DNA vaccine (50 ug) was delivered intramuscularly bilaterally (20 ul total into each tibialis anterior muscle) with concomitant electroporation in a prime/boost regimen, two weeks apart between each vaccination. MUC1-, CEA-, and TERT-specific cellular responses, and MUC1- and CEA-specific humoral responses were measured 7 days after the last immunization in an IFN-γ ELISpot assay and ELISA assay, respectively. In total, six different plasmids carrying triple-antigen DNA constructs each encoding three TAA polypeptides linked by 2A peptides were used as follows: MUC1-2A-TERT_{Δ240}-2A-mCEA (Plasmid 1424), mCEA-2A-MUC1-2A-TERT_{Δ240} (Plasmid 1425), TERT_{Δ240}-2A-MUC1-2A-mCEA (Plasmid 1426), TERT_{Δ240}-2A-mCEA-2A-MUC1 (Plasmid 1427), MUC1-2A-cCEA-2A-TERT_{Δ240} (Plasmid 1428), cCEA-2A-TERT_{Δ240}-2A-MUC1 (Plasmid 1429).

[0682] Results.

[0683] Tables 11A-C show the ELISpot data from C57BL/6J splenocytes cultured with peptide pools derived from the MUC1, CEA, and TERT peptide libraries (see also Table 15), the ICS data from C57BL/6J splenocytes cultured with TERT peptide aa1025-1039, and the ELISA data from C57BL/6J mouse sera. A positive response is defined as having SFC>100, a frequency of IFN-γ⁺ CD8⁺ T cells>0.1%, and IgG titers>99. Numbers in column 3 of Tables 11A-C represent # IFN-γ spots/10⁶ splenocytes after restimulation with MUC1, CEA, or TERT peptide pools and background subtraction, respectively. Numbers in bold font indicate that at least 1 peptide pool tested was too numerous to count, therefore the true figure is at least the value stated. Numbers in column 4 of Tables 11A-B represent the anti-MUC1 and CEA IgG titer, respectively (Optical Density (O.D)=1, Limit of Detection (L.O.D)=99.0). Numbers in column 4 of Table 110 represent the frequency of CD8⁺ T cells being IFN-γ⁺ after restimulation with TERT-specific peptide TERT aa1025-1039, and background subtraction. As shown in Tables 11A-C, the immunogenic MUC1, CEA, and TERT polypeptides made with the MUC1-, CEA-, and TERT-expressing triple-antigen constructs were capable of inducing T cell responses against all three antigens, and B cell responses against MUC1. In contrast, while mCEA containing triple-antigen constructs (Plasmids 1424-1427) were capable of inducing B cell responses against CEA, cCEA containing triple-antigen constructs (Plasmids 1428-1429) induced either weaker or no CEA-specific B cell responses.

TABLE 11A
MUC1-specific T and B cell responses induced by the triple-
antigen DNA constructs (Plasmids 1424-1429) encoding human
native full-length membrane-bound MUC1, human membrane-
bound or cytosolic CEA, and human truncated (Δ240)
cytosolic TERT polypeptides in C57BL/6J mice

MUC1

| | | # IFN-γ spots/ | |
|---|---|---|---|
| Construct ID | Animal | 10⁶ splenocytes | IgG titer |
| Plasmid 1424 | 33 | 1077 | 4110 |
| | 34 | 1043 | 2280 |
| | 35 | 331 | 1120 |
| | 36 | 245 | 2060 |
| | 37 | 1133 | 3400 |
| | 38 | 660 | 4770 |
| | 39 | 547 | 3460 |
| | 40 | 332 | 838 |
| Plasmid 1425 | 41 | 660 | 3110 |
| | 42 | 603 | 1550 |
| | 43 | 501 | 3880 |
| | 44 | 357 | 884 |
| | 45 | 449 | 2040 |
| | 46 | 740 | 4070 |
| | 47 | 701 | 4740 |
| | 48 | 853 | 2460 |
| Plasmid 1426 | 49 | 732 | 2930 |
| | 50 | 189 | 2190 |
| | 51 | 589 | 2380 |
| | 52 | 1608 | 4050 |
| | 53 | 439 | 1360 |
| | 54 | 1512 | 1090 |
| | 55 | 1332 | 2650 |
| | 56 | 1909 | 2030 |
| Plasmid 1427 | 57 | 727 | 1540 |
| | 58 | 799 | 3550 |
| | 59 | 928 | 590 |
| | 60 | 459 | 1010 |
| | 61 | 455 | 2630 |
| | 62 | 1333 | 2300 |
| | 63 | 1200 | 2920 |
| | 64 | 476 | 4210 |
| Plasmid 1428 | 65 | 1483 | 5170 |
| | 66 | 501 | 573 |
| | 67 | 1435 | 3480 |
| | 68 | 1421 | 6870 |
| | 69 | 813 | 6970 |
| | 70 | 601 | 4770 |
| | 71 | 1913 | 7570 |
| | 72 | 2179 | 6510 |
| Plasmid 1429 | 73 | 951 | 1940 |
| | 74 | 765 | 2700 |
| | 75 | 1085 | 7390 |
| | 76 | 1561 | 5120 |
| | 77 | 600 | 2870 |
| | 78 | 1044 | 6430 |
| | 79 | 1777 | 12500 |
| | 80 | 991 | 5890 |

TABLE 11B
CEA-specific T and B cell responses induced by the triple-
antigen DNA constructs (1424-1429) encoding human native
full-length membrane-bound MUC1, human membrane-bound
or cytosolic CEA, and human truncated (Δ240) cytosolic
TERT polypeptides in C57BL/6J mice

CEA

| | | # IFN-γ spots/ | |
|---|---|---|---|
| Construct ID | Animal | 10⁶ splenocytes | IgG titer |
| Plasmid 1424 | 33 | 1147 | 5530 |
| | 34 | 1147 | 10700 |
| | 35 | 374 | 8880 |
| | 36 | 208 | 18500 |
| | 37 | 491 | 4620 |
| | 38 | 702 | 9190 |
| | 39 | 495 | 12200 |
| | 40 | 455 | 5960 |
| Plasmid 1425 | 41 | 735 | 18500 |
| | 42 | 495 | 5670 |
| | 43 | 1031 | 15400 |
| | 44 | 399 | 13100 |
| | 45 | 353 | 11500 |
| | 46 | 861 | 11100 |
| | 47 | 699 | 14400 |
| | 48 | 932 | 12400 |
| Plasmid 1426 | 49 | 861 | 13200 |
| | 50 | 701 | 15400 |
| | 51 | 859 | 18000 |
| | 52 | 2309 | 13500 |
| | 53 | 673 | 12600 |
| | 54 | 2169 | 10000 |
| | 55 | 1760 | 15700 |
| | 56 | 1751 | 21800 |
| Plasmid 1427 | 57 | 1070 | 8590 |
| | 58 | 803 | 11000 |
| | 59 | 561 | 8740 |
| | 60 | 343 | 7780 |
| | 61 | 191 | 6150 |
| | 62 | 819 | 10000 |
| | 63 | 839 | 7010 |
| | 64 | 484 | 7900 |
| Plasmid 1428 | 65 | 437 | 4250 |
| | 66 | 839 | 1720 |
| | 67 | 843 | 2080 |
| | 68 | 629 | 2090 |
| | 69 | 229 | 1060 |
| | 70 | 665 | 1690 |
| | 71 | 941 | 2530 |
| | 72 | 1181 | 2520 |
| Plasmid 1429 | 73 | 993 | 99 |
| | 74 | 453 | 99 |
| | 75 | 1173 | 99 |
| | 76 | 253 | 99 |
| | 77 | 843 | 99 |
| | 78 | 419 | 178 |
| | 79 | 989 | 2640 |
| | 80 | 981 | 99 |

TABLE 11C
TERT-specific T cell responses induced by the triple-
antigen DNA constructs (1424-1429) encoding human
native full-length membrane-bound MUC1, human membrane-
bound or cytosolic CEA, and human truncated (Δ240)
cytosolic TERT polypeptides in C57BL/6J mice

TERT

| | | # IFN-γ spots/ | % CD8⁺ T cells |
|---|---|---|---|
| Construct ID | Animal | 10⁶ splenocytes | being IFN-γ⁺ |
| Plasmid 1424 | 33 | 1305 | 0.98 |
| | 34 | 1619 | 0.76 |
| | 35 | 2503 | 0.64 |
| | 36 | 509 | 0.65 |
| | 37 | 709 | 0.35 |
| | 38 | 363 | 0.43 |
| | 39 | 499 | Not determined |
| | 40 | 140 | Not determined |
| Plasmid 1425 | 41 | 647 | 0.30 |
| | 42 | 252 | 0.13 |
| | 43 | 392 | 0.36 |
| | 44 | 629 | 0.43 |
| | 45 | 208 | 0.20 |
| | 46 | 515 | 0.41 |
| | 47 | 635 | Not determined |
| | 48 | 2145 | Not determined |
| Plasmid 1426 | 49 | 1742 | 0.52 |
| | 50 | 2262 | 0.65 |
| | 51 | 1959 | 1.21 |
| | 52 | 4739 | 1.14 |
| | 53 | 1123 | 1.01 |
| | 54 | 3987 | 0.77 |
| | 55 | 2925 | Not determined |
| | 56 | 5477 | Not determined |
| Plasmid 1427 | 57 | 548 | 0.17 |
| | 58 | 645 | 0.29 |
| | 59 | 956 | 0.31 |
| | 60 | 910 | 0.45 |
| | 61 | 1916 | 0.92 |
| | 62 | 1273 | 0.21 |
| | 63 | 3115 | Not determined |
| | 64 | 576 | Not determined |
| Plasmid 1428 | 65 | 2475 | 0.84 |
| | 66 | 301 | 0.07 |
| | 67 | 4977 | 2.10 |
| | 68 | 1618 | 1.40 |
| | 69 | 1995 | 1.15 |
| | 70 | 2755 | 1.17 |
| | 71 | 4469 | Not determined |
| | 72 | 3409 | Not determined |
| Plasmid 1429 | 73 | 2324 | 0.86 |
| | 74 | 2866 | 1.73 |
| | 75 | 3795 | 1.92 |
| | 76 | 4142 | 0.97 |
| | 77 | 2760 | 1.60 |
| | 78 | 2655 | 1.06 |
| | 79 | 3103 | Not determined |
| | 80 | 1913 | Not determined |

[0684] Immune Response Study in C57BL/6J Mice Using Adenoviral Vectors

[0685] Study Design.

[0686] 48 female C57BL/6J mice were primed with triple-antigen adenoviral vectors encoding human MUC1, mCEA or cCEA, and TERT_{Δ240}, at 1e10 viral particles by intramuscular injection (50 ul into each tibialis anterior muscle). 14 days later, animals were boosted with triple-antigen DNA constructs (50 ug) delivered intramuscularly bilaterally (20 ul into each tibialis anterior muscle) with concomitant electroporation. MUC1-, CEA-, and TERT-specific cellular responses, and MUC1- and CEA-specific humoral responses were measured 7 days after the last immunization in an IFN-γ ELISpot and ICS assay, and an ELISA assay, respectively. In total, six triple-antigen adenoviral and DNA constructs encoding MUC1, mCEA or cCEA, and TERT_{Δ240} linked by 2A peptides were used as follows: MUC1-2A-TERT_{Δ240}-2A-mCEA (Plasmid 1424), mCEA-2A-MUC1-2A-TERT_{Δ240} (Plasmid 1425), TERT_{Δ240}-2A-MUC1-2A-mCEA (Plasmid 1426), TERT_{Δ240}-2A-mCEA-2A-MUC1 (Plasmid 1427), MUC1-2A-cCEA-2A-TERT_{Δ240} (Plasmid 1428), cCEA-2A-TERT_{Δ240}-2A-MUC1 (Plasmid 1429).

[0687] Results.

[0688] Tables 12A-C shows the ELISpot data from C57BL/6J splenocytes cultured with peptide pools derived from the MUC1, CEA, and TERT peptide libraries (see also Table 15), the ICS data from C57BL/6J splenocytes cultured with TERT peptide aa1025-1039, and the ELISA data from C57BL/6J mouse sera. A positive response is defined as having SFC>100, a frequency of IFN-γ⁺ CD8⁺ T cells>0.1%, and IgG titers>99. Numbers in column 3 in Tables 12A-C represent # IFN-γ spots/10⁶ splenocytes after restimulation with MUC1, CEA, or TERT peptide pools, and background subtraction, respectively. Numbers in bold font indicate that at least 1 peptide pool tested was too numerous to count, therefore the true figure is at least the value stated. Numbers in column 4 in Table 12C represent # IFN-γ⁺ CD8⁺ T cells/10⁶ CD8⁺ T cells after restimulation with TERT-specific peptide TERT aa1025-1039, and background subtraction. Numbers in column 4 in Tables 12A-B represent the anti-MUC1 and anti-CEA IgG titer, respectively (Optical Density (O.D)=1, Limit of Detection (L.O.D)=99.0). As shown in Tables 12A-C, the immunogenic MUC1, CEA, and TERT polypeptides made with MUC1-, CEA-, and TERT-expressing triple-antigen constructs were capable of inducing T cell responses against all three antigens, and B cell responses against MUC1. In contrast, while mCEA containing triple-antigen constructs (Plasmids 1424-1427) were capable of inducing B cell responses against CEA, cCEA containing triple-antigen constructs (Plasmids 1428-1429) induced either weaker or no CEA-specific B cell responses.

TABLE 12A
MUC1-specific T and B cell responses induced by the triple-
antigen adenoviral AdC68Y and DNA constructs (Plasmids 1424-
1429) encoding human native full-length membrane-bound MUC1,
human membrane-bound or cytosolic CEA, and human truncated
(Δ240) cytosolic TERT polypeptides in C57BL/6J mice

MUC1

| | | # IFN-γ spots/ | |
|---|---|---|---|
| Construct ID | Animal # | 10⁶ splenocytes | IgG titer |
| Plasmid 1424 | 33 | 568 | Not determined |
| | 34 | 421 | 34100 |
| | 35 | 929 | 23600 |
| | 36 | 531 | 12900 |
| | 37 | 359 | 7190 |
| | 38 | 769 | 29500 |
| | 39 | 668 | 12300 |
| | 40 | 340 | 30400 |
| Plasmid 1425 | 41 | 251 | 21200 |
| | 42 | 233 | 12400 |
| | 43 | 248 | 10700 |
| | 44 | 137 | 13400 |
| | 45 | 244 | 8400 |
| | 46 | 603 | 15000 |
| | 47 | 469 | 19800 |
| | 48 | 745 | 8370 |
| Plasmid 1426 | 49 | 239 | 6000 |
| | 50 | 291 | 4390 |
| | 51 | 381 | 12700 |
| | 52 | 677 | 5460 |
| | 53 | 548 | 8940 |
| | 54 | 232 | 8170 |
| | 55 | 468 | 8240 |
| | 56 | 224 | 5590 |
| Plasmid 1427 | 57 | 675 | 7650 |
| | 58 | 223 | 3930 |
| | 59 | 605 | 7710 |
| | 60 | 163 | 4190 |
| | 61 | Not determined | 12100 |
| | 62 | 244 | 4230 |
| | 63 | 131 | 4990 |
| | 64 | 429 | 6580 |
| Plasmid 1428 | 65 | 331 | 12700 |
| | 66 | 181 | 4550 |
| | 67 | 360 | 21700 |
| | 68 | 1252 | 25100 |
| | 69 | 345 | 10200 |
| | 70 | 304 | 9670 |
| | 71 | 261 | 11800 |
| | 72 | 485 | 16700 |
| Plasmid 1429 | 73 | 284 | 13300 |
| | 74 | 399 | 12800 |
| | 75 | 391 | 41500 |
| | 76 | 191 | 19900 |
| | 77 | 304 | 8700 |
| | 78 | 651 | 13400 |
| | 79 | 288 | 13800 |
| | 80 | 839 | 2580 |

TABLE 12B
CEA-specific T and B cell responses induced by the triple-
antigen adenoviral AdC68Y and DNA constructs (Plasmids 1424-
1429) encoding human native full-length membrane-bound MUC1,
human membrane-bound or cytosolic CEA, and human truncated
(Δ240) cytosolic TERT polypeptides in C57BL/6J mice

CEA

| | | # IFN-γ spots/ | |
|---|---|---|---|
| Construct ID | Animal # | 10⁶ splenocytes | IgG titer |
| Plasmid 1424 | 33 | 352 | 61600 |
| | 34 | 505 | 45500 |
| | 35 | 428 | 29700 |
| | 36 | 207 | 23500 |
| | 37 | 279 | 35900 |
| | 38 | 400 | 17700 |
| | 39 | 309 | 22100 |
| | 40 | 362 | 38200 |
| Plasmid 1425 | 41 | 867 | 73500 |
| | 42 | 1761 | 28900 |
| | 43 | 547 | 59400 |
| | 44 | 2123 | 44100 |
| | 45 | 359 | 39300 |
| | 46 | 2051 | 71300 |
| | 47 | 466 | 49800 |
| | 48 | 556 | 61700 |
| Plasmid 1426 | 49 | 415 | 12300 |
| | 50 | 599 | 28300 |
| | 51 | 462 | 23900 |
| | 52 | 752 | 14800 |
| | 53 | 799 | 18900 |
| | 54 | 543 | 24700 |
| | 55 | 595 | 17800 |
| | 56 | 439 | 17400 |
| Plasmid 1427 | 57 | 400 | 31000 |
| | 58 | 362 | 18400 |
| | 59 | 343 | 14800 |
| | 60 | 205 | 24000 |
| | 61 | Not determined | 44300 |
| | 62 | 207 | 17900 |
| | 63 | 227 | 29500 |
| | 64 | 329 | 28600 |
| Plasmid 1428 | 65 | 208 | 180 |
| | 66 | 362 | 2840 |
| | 67 | 224 | 7030 |
| | 68 | 583 | 5740 |
| | 69 | 303 | 2030 |
| | 70 | 239 | 2880 |
| | 71 | 489 | 1680 |
| | 72 | 234 | 1490 |
| Plasmid 1429 | 73 | 813 | 99 |
| | 74 | 421 | 619 |
| | 75 | 563 | 99 |
| | 76 | 261 | 99 |
| | 77 | 356 | 99 |
| | 78 | 600 | 99 |
| | 79 | 278 | 992 |
| | 80 | 393 | 552 |

TABLE 12C
TERT-specific T cell responses induced by the triple-antigen
adenoviral AdC68Y and DNA constructs (Plasmids 1424-1429)
encoding human native full-length membrane-bound MUC1, human
membrane-bound or cytosolic CEA, and human truncated (Δ240)
cytosolic TERT polypeptides in C57BL/6J mice

| | | TERT | |
|---|---|---|---|
| | | # IFN-γ spots/ | % CD8⁺ T cells |
| Construct ID | Animal # | 10⁶ splenocytes | being IFN-γ⁺ |
| Plasmid 1424 | 33 | 764 | 1.45 |
| | 34 | 960 | 0.96 |
| | 35 | 1675 | 1.16 |
| | 36 | 1161 | 3.24 |
| | 37 | 1037 | 1.30 |
| | 38 | 684 | 1.00 |
| | 39 | 2887 | Not determined |
| | 40 | 2019 | Not determined |
| Plasmid 1425 | 41 | 3595 | 4.15 |
| | 42 | 1839 | 2.15 |
| | 43 | 1607 | 2.06 |
| | 44 | 1283 | 2.39 |
| | 45 | 2252 | 3.15 |
| | 46 | 2080 | 2.82 |
| | 47 | 571 | Not determined |
| | 48 | 985 | Not determined |
| Plasmid 1426 | 49 | 3129 | 2.46 |
| | 50 | 2264 | 2.51 |
| | 51 | 2901 | 2.43 |
| | 52 | 4556 | 3.51 |
| | 53 | 3396 | 3.97 |
| | 54 | 4184 | 6.19 |
| | 55 | 3311 | Not determined |
| | 56 | 3464 | Not determined |
| Plasmid 1427 | 57 | 2589 | 3.13 |
| | 58 | 991 | 2.52 |
| | 59 | 1123 | 1.16 |
| | 60 | 1993 | 3.16 |
| | 61 | Not determined | 3.20 |
| | 62 | 452 | 3.03 |
| | 63 | 793 | Not determined |
| | 64 | 2100 | Not determined |
| Plasmid 1428 | 65 | 2197 | 3.10 |
| | 66 | 4530 | 7.12 |
| | 67 | 4406 | 8.91 |
| | 68 | 5134 | 7.31 |
| | 69 | 1969 | 3.15 |
| | 70 | 4199 | 5.90 |
| | 71 | 4088 | Not determined |
| | 72 | 3668 | Not determined |
| Plasmid 1429 | 73 | 3929 | 7.98 |
| | 74 | 4779 | 5.95 |
| | 75 | 5060 | 10.10 |
| | 76 | 4251 | 8.22 |
| | 77 | 3675 | 6.04 |
| | 78 | 3707 | 3.57 |
| | 79 | 4088 | Not determined |
| | 80 | 3872 | Not determined |

[0689] Immune Response Study in HLA-A24 Mice

[0690] Study Design.

[0691] Sixteen mixed gender HLA-A24 mice were primed with an adenoviral AdC68Y triple-antigen construct (Plasmid 1426: TERT_{Δ240}-2A-MUC1-2A-mCEA or Plasmid 1428: MUC1-2A-cCEA-2A-TERT_{Δ240}) encoding human MUC1, mCEA or cCEA, and TERT_{Δ240} at 1e10 viral particles by intramuscular injection (50 ul into each tibialis anterior muscle). 14 days later, animals were boosted intramuscularly with 50 ug triple-antigen DNA construct (Plasmid 1426 or 1428) encoding the same three antigens (20 ul delivered into each tibialis anterior muscle with concomitant electroporation). HLA-A24-restricted MUC1-specific cellular responses were measured 7 days after the last immunization in an IFN-γ ELISpot assay.

[0692] Results.

[0693] Table 13 shows the ELISpot data from HLA-A24 splenocytes cultured with the MUC1 peptide aa524-532. A positive response is defined as having SFC>50. Numbers in column 3 represent # IFN-γ spots/10⁶ splenocytes after restimulation with MUC1 peptide aa524-532 and background subtraction. As shown in Table 13, the immunogenic MUC1 polypeptides made with the MUC1-, CEA-, and TERT-expressing triple-antigen constructs 1426 and 1428 were capable of inducing HLA-A24-restricted MUC1 peptide aa524-532-specific CD8⁺ T cell responses. Importantly, T cell responses derived from cancer patients against this specific MUC1 peptide have been shown to correlate with anti-tumor efficacy in vitro (Jochems C et al., Cancer Immunol Immunother (2014) 63:161-174) demonstrating the importance of raising cellular responses against this specific epitope.

TABLE 13
HLA-A24-restricted MUC1 peptide aa524-532-specific T cell responses
induced by the triple-antigen adenoviral and DNA constructs Plasmid 1426
(TERT_{Δ240}-2A-MUC1-2A-mCEA) and Plasmid 1428 (MUC1-2A-cCEA-
2A-TERT_{Δ240}) encoding human native full-length membrane-bound
MUC1, human membrane-bound or cytosolic CEA, and human truncated
(Δ240) cytosolic TERT polypeptides in HLA-A24 mice

| | | # IFN-γ spots/ |
|---|---|---|
| Construct ID | Animal # | 10⁶ splenocytes |
| Plasmid 1426 | 49 | 49 |
| | 50 | 9 |
| | 51 | 109 |
| | 52 | 57 |
| | 53 | 75 |
| | 54 | 85 |
| | 55 | 69 |
| | 56 | 138 |
| Plasmid 1428 | 65 | 143 |
| | 66 | 81 |
| | 67 | 400 |
| | 68 | 205 |
| | 69 | 63 |
| | 70 | 74 |
| | 71 | 93 |
| | 72 | 233 |

[0694] Immune Response Study in Monkeys

[0695] Study Design.

[0696] 42 Chinese-sourced cynomolgus macaques were primed on day 1 with AdC68Y adenoviral vectors encoding human native full-length membrane-bound MUC1 (MUC1), human membrane-bound or cytoplasmic CEA (mCEA or cCEA), and human truncated (Δ240) cytosolic TERT (TERT_{Δ240} antigens at 2e11 viral particles by bilateral intramuscular injection (1 mL total). On day 30 and day 57 animals were boosted with DNA encoding the same three antigens delivered intramuscularly bilaterally via electroporation (2 mL total). Anti-CTLA-4 was administered subcutaneously on days 1 (32 mg), 30 (50 mg) and 57 (75 mg). 15 days after the last immunization, animals were bled and PBMCs and serum isolated to assess MUC1-, CEA-, and TERT-specific cellular (ELISpot, ICS) and MUC1- and CEA-specific humoral (ELISA) responses, respectively. In total, six triple-antigen adenoviral and DNA constructs encoding MUC1, mCEA or cCEA, and TERT_{Δ240} linked by 2A peptides were evaluated: MUC1-2A-TERT_{Δ240}-2A-mCEA (Plasmid 1424), mCEA-2A-MUC1-2A-TERT_{Δ240} (Plasmid 1425), TERT_{Δ240}-2A-MUC1-2A-mCEA (Plasmid 1426), TERT_{Δ240}-2A-mCEA-2A-MUC1 (Plasmid 1427), MUC1-2A-cCEA-2A-TERT_{Δ240} (Plasmid 1428), cCEA-2A-TERT_{Δ240}-2A-MUC1 (Plasmid 1429).

[0697] Results.

[0698] Tables 14A, 14B, and 14C show the ELISpot and ICS data from Chinese-sourced cynomolgus macaque PBMCs cultured with peptide pools derived from the MUC1, CEA, and TERT peptide libraries (see also Table 15), and the ELISA data from Chinese-sourced cynomolgus macaque sera. A positive response is defined as having SFC>50, IFN-γ⁺ CD8⁺ T cells/1e6 CD8⁺ T cells>50, and IgG titers>99. Numbers in column 3 in Tables 14A-C represent # IFN-γ spots/10⁶ splenocytes after restimulation with MUC1, CEA, or TERT peptide pools, and background subtraction, respectively. Numbers in bold font indicate that at least 1 peptide pool tested was too numerous to count, therefore the true figure is at least the value stated. Numbers in column 4 in Tables 14A-C represent # IFN-γ⁺ CD8⁺ T cells/10⁶ CD8⁺ T cells after restimulation with MUC1, CEA, or TERT peptide pools, respectively, and background subtraction. Numbers in column 5 in Tables 14A-B represent the anti-MUC1 and anti-CEA IgG titer (Optical Density (O.D)=1, Limit of Detection (L.O.D)=99.0), respectively. As shown in Tables 14A-C, the immunogenic MUC1, CEA, and TERT polypeptides made with MUC1-, CEA-, and TERT-expressing triple-Ag constructs were capable of inducing cellular responses against all three antigens, and humoral responses against MUC1. However, triple-antigen constructs containing mCEA induced greater CEA-specific B cell responses than those containing cCEA.

TABLE 14A
MUC1-specific T and B cell responses induced by the
triple-antigen adenoviral AdC68Y and DNA constructs
(Plasmids 1424-1429) encoding human native full-length
membrane-bound MUC1, human membrane-bound or cytoplasmic
CEA, and human truncated (Δ240) cytosolic TERT polypeptides
in Chinese-sourced cynomolgus macaques

| | | MUC1 | | |
|---|---|---|---|---|
| | | # IFN-γ | # IFN-γ⁺ CD8⁺ | |
| | | spots/10⁶ | T cells/1e6 | |
| Construct ID | Animal # | splenocytes | CD8⁺ T cells | IgG titer |
| Plasmid 1424 | 1001 | 152 | 0 | 8100 |
| | 1002 | 687 | 2211.9 | 7230 |
| | 1003 | 313 | 0 | 7630 |
| | 1004 | 1610 | 12216.5 | 21500 |
| | 1501 | 93 | 0 | 13700 |
| | 1502 | 128 | 0 | 22700 |
| | 1503 | 637 | 1839.2 | 13800 |
| Plasmid 1425 | 2001 | 533 | 0 | 10700 |
| | 2002 | 1445 | 0 | 17200 |
| | 2003 | 833 | 4585.5 | 9640 |
| | 2004 | 143 | 0 | 20200 |
| | 2501 | 297 | 0 | 8130 |
| | 2502 | 223 | 0 | 13800 |
| | 2503 | 540 | 2096.4 | 4130 |
| Plasmid 1426 | 3001 | 135 | 0 | 14100 |
| | 3002 | 87 | 0 | 22100 |
| | 3003 | 70 | 0 | 15700 |
| | 3004 | 677 | 0 | 25900 |
| | 3501 | 1965 | 7438.9 | 17500 |
| | 3502 | 1667 | 899.2 | 34700 |
| | 3503 | 540 | 0 | 31100 |
| Plasmid 1427 | 4001 | 187 | 0 | 15800 |
| | 4002 | 37 | 0 | 4870 |
| | 4003 | 568 | 1290.0 | 11300 |
| | 4004 | 1558 | 23074.2 | 8490 |
| | 4501 | 22 | 0 | 8520 |
| | 4502 | 1267 | 561.4 | 13300 |
| | 4503 | 572 | 4615.6 | 5390 |
| Plasmid 1428 | 5001 | 40 | 1019.3 | 9960 |
| | 5002 | 973 | 6178.6 | 11100 |
| | 5003 | 47 | 0 | 18400 |
| | 5004 | 1175 | 3574.1 | 28200 |
| | 5501 | 245 | 0 | 12000 |
| | 5502 | 1663 | 1145.4 | 57100 |
| | 5503 | 1825 | 10680.4 | 15300 |
| Plasmid 1429 | 6001 | 320 | 300.1 | 19600 |
| | 6002 | 787 | 305.6 | 20900 |
| | 6003 | 233 | 0 | 11200 |
| | 6004 | 443 | 0 | 12700 |
| | 6501 | 80 | 0 | 12600 |
| | 6502 | 688 | 0 | 35600 |
| | 6503 | 1755 | 0 | 16900 |

TABLE 14B
CEA-specific T and B cell responses induced by the triple-
antigen adenoviral AdC68Y and DNA constructs (Plasmids
1424-1429) encoding human native full-length membrane-
bound MUC1, human membrane-bound or cytoplasmic CEA,
and human truncated (Δ240) cytosolic TERT polypeptides
in Chinese-sourced cynomolgus macaques

| | | CEA | | |
|---|---|---|---|---|
| | | # IFN-γ | # IFN-γ⁺ CD8⁺ | |
| | | spots/10⁶ | T cells/1e6 | |
| Construct ID | Animal # | splenocytes | CD8⁺ T cells | IgG titer |
| Plasmid 1424 | 1001 | 130 | 0 | 26300 |
| | 1002 | 268 | 0 | 31100 |
| | 1003 | 882 | 2002.6 | 16700 |
| | 1004 | 1248 | 0 | 115000 |
| | 1501 | 133 | 0 | 39600 |
| | 1502 | 350 | 0 | 97500 |
| | 1503 | 323 | 947.1 | 27200 |
| Plasmid 1425 | 2001 | 650 | 1191.4 | 37700 |
| | 2002 | 2003 | 5608.2 | 38700 |
| | 2003 | 342 | 0 | 35600 |
| | 2004 | 343 | 0 | 74900 |
| | 2501 | 1770 | 1507.0 | 41700 |
| | 2502 | 1547 | 20858.5 | 54000 |
| | 2503 | 957 | 1549.3 | 36200 |
| Plasmid 1426 | 3001 | 448 | 0 | 94400 |
| | 3002 | 158 | 0 | 88300 |
| | 3003 | 92 | 0 | 104000 |
| | 3004 | 342 | 0 | 119000 |
| | 3501 | 2383 | 0 | 64400 |
| | 3502 | 2112 | 0 | 49300 |
| | 3503 | 1673 | 0 | 177000 |
| Plasmid 1427 | 4001 | 2065 | 46600.1 | 48200 |
| | 4002 | 195 | 0 | 44300 |
| | 4003 | 657 | 0 | 35500 |
| | 4004 | 2238 | 7032.7 | 97500 |
| | 4501 | 1370 | 9081.2 | 62100 |
| | 4502 | 2065 | 1704.7 | 48500 |
| | 4503 | 1020 | 3005.5 | 23500 |
| Plasmid 1428 | 5001 | 430 | 2597.8 | 29300 |
| | 5002 | 1212 | 5461.8 | 8730 |
| | 5003 | 297 | 1150.6 | 15800 |
| | 5004 | 245 | 2367.2 | 52200 |
| | 5501 | 397 | 564.7 | 12900 |
| | 5502 | 525 | 0 | 16100 |
| | 5503 | 710 | 4371.4 | 5330 |
| Plasmid 1429 | 6001 | 263 | 248.1 | 9650 |
| | 6002 | 342 | 0 | 5320 |
| | 6003 | 367 | 1111.6 | 1960 |
| | 6004 | 1343 | 7055.3 | 1500 |
| | 6501 | 1015 | 6290.7 | 16700 |
| | 6502 | 1827 | 796.4 | 28000 |
| | 6503 | 1740 | 11848.4 | 13200 |

TABLE 14C
TERT-specific T cell responses induced by the triple-antigen adenoviral
AdC68Y and DNA constructs (Plasmids 1424-1429) encoding human
native full-length membrane-bound MUC1, human membrane-bound or
cytoplasmic CEA, and human truncated (Δ240) cytosolic TERT
polypeptides in Chinese-sourced cynomolgus macaques

| | | TERT | |
|---|---|---|---|
| | | # IFN-γ spots/ | # IFN-γ⁺ CD8⁺ T cells/ |
| Construct ID | Animal # | 10⁶ splenocytes | 1e6 CD8⁺ T cells |
| Plasmid 1424 | 1001 | 988 | 1854.9 |
| | 1002 | 512 | 609.1 |
| | 1003 | 320 | 0 |
| | 1004 | 1762 | 9865.4 |
| | 1501 | 1413 | 11844.9 |
| | 1502 | 1890 | 15520.3 |
| | 1503 | 978 | 2592.6 |
| Plasmid 1425 | 2001 | 223 | 3278.8 |
| | 2002 | 1512 | 263.9 |
| | 2003 | 318 | 6939.2 |
| | 2004 | 55 | 0 |
| | 2501 | 118 | 0 |
| | 2502 | 1808 | 0 |
| | 2503 | 233 | 373.4 |
| Plasmid 1426 | 3001 | 2798 | 37114.7 |
| | 3002 | 853 | 0 |
| | 3003 | 1458 | 32332.1 |
| | 3004 | 653 | 207.5 |
| | 3501 | 1878 | 6543.9 |
| | 3502 | 2957 | 33410.8 |
| | 3503 | 1958 | 5418.9 |
| Plasmid 1427 | 4001 | 242 | 379.5 |
| | 4002 | 1237 | 4109.2 |
| | 4003 | 903 | 1438.5 |
| | 4004 | 185 | 1196.0 |
| | 4501 | 105 | 2526.1 |
| | 4502 | 2815 | 16330.0 |
| | 4503 | 608 | 6737.9 |
| Plasmid 1428 | 5001 | 50 | 652.8 |
| | 5002 | 468 | 504.5 |
| | 5003 | 1277 | 284.7 |
| | 5004 | 333 | 2714.2 |
| | 5501 | 1217 | 8357.3 |
| | 5502 | 1715 | 833.4 |
| | 5503 | 243 | 462.6 |
| Plasmid 1429 | 6001 | 643 | 802.5 |
| | 6002 | 2557 | 5767.4 |
| | 6003 | 1082 | 3997.1 |
| | 6004 | 1890 | 2557.6 |
| | 6501 | 1447 | 22060.9 |
| | 6502 | 2032 | 0 |
| | 6503 | 2082 | 637.7 |

TABLE 15
Peptide Pools Derived from Human Tumor-Associated
Antigen (TAA) MUC1, CEA, and TERT

| TAA | Peptide Pools |
|---|---|
| MUC1 | 116 sequential 15-mer peptides, overlapping by 11 amino acids, |
| | covering amino acids 1-224 and 945-1255 (excluding all but 1 of |
| | 20 amino acid repeats) of the MUC1 precursor protein of SEQ |
| | ID NO: 1 |
| CEA | 125 sequential 15-mer peptides, overlapping by 11 amino acids, |
| | covering the CEA protein sequence of amino acids 1-147 and |
| | amino acids 325-699 (excluding domains 2-3) of SEQ ID N0: 2 |
| TERT | 221 sequential 15-mer peptides, overlapping by 11 amino acids, |
| | coveringthe TERT_{Δ240} protein sequence of SEQ ID NO: 10 |
| | (amino acids 241-1134, total 894 amino acids), excluding the |
| | first 240 amino acids of the native full-length TERT protein |
| | of SEQ ID NO: 3 |

TABLE 16
Primers for Plasmid Construction

| Primer | SEQUENCE (5′ TO 3′) | Strand |
|---|---|---|
| EMCV_Muc1_R-35 | GTTGAAGATTCTGCCGGATCCCAGGTTGGCGG | Antisense |
| | AGGCAGCGGCCACG | |
| EMCV2A_F-34 | GCTACTTCGCCGACCTGCTGATCCACGACA | Sense |
| | TCGAGACAAACCCTGGC | |
| EMCV2A_R-36 | GGTCGGCGAAGTAGCCGGCGTAGTGGGCG | Antisense |
| | TTGAAGATTCTGCCGGAT | |
| f Muc 960-983 | CGGCGTCTCATTCTTCTTTCTGTC | Sense |
| f pmed Nhe cytMuc | ACCCTGTGACGAACATGGCTAGCACAGGCT | Sense |
| | CTGGCCACGCCAG | |
| f pmed Nhe Muc | ACCCTGTGACGAACATGGCTAGCACCCCTG | Sense |
| | GAACCCAGAGCC | |
| f pmed Nhe Ter240 | ACCCTGTGACGAACATGGCTAGCGGAGCTG | Sense |
| | CCCCGGAGCCGG | |
| f tert 1584-1607 | TCTCACCGACCTCCAGCCTTACAT | Sense |
| f tg link Ter240 | TGGGAGGCTCCGGCGGAGGAGCTGCCCCG | Sense |
| | GAGCCGG | |
| f1 EM2A Muc | CCTGCTGATCCACGACATCGAGACAAACCC | Sense |
| | TGGCCCCACCCCTGGAACCCAGAGCC | |
| f1 ERBV2A cMuc | TGGCCGGCGACGTGGAACTGAACCCTGGC | Sense |
| | CCTACAGGCTCTGGCCACGCCAG | |
| f1 ERBV2A Muc | TGGCCGGCGACGTGGAACTGAACCCTGGC | Sense |
| | CCTACCCCTGGAACCCAGAGCC | |
| f1 ERBV2A Ter d342 | TGGCCGGCGACGTGGAACTGAACCCTGGC | Sense |
| | CCTAGCTTCCTCCTGTCGTCGCTCA | |
| f1 ERBV2A Ter240 | TGGCCGGCGACGTGGAACTGAACCCTGGC | Sense |
| | CCTGGAGCTGCCCCGGAGCCGG | |
| f1 ERBV2A Tert | TGGCCGGCGACGTGGAACTGAACCCTGGC | Sense |
| d541 | CCTGCCAAATTTCTGCATTGGCTGATG | |
| f1 PTV2A Muc | TGGAAGAGAACCCTGGCCCTACCCCTGGAA | Sense |
| | CCCAGAGCC | |
| f1 T2A Tert d342 | GCGACGTGGAAGAGAACCCTGGCCCCAGCT | Sense |
| | TCCTCCTGTCGTCGCTCA | |
| f1 T2A Tert d541 | GCGACGTGGAAGAGAACCCTGGCCCCGCC | Sense |
| | AAATTTCTGCATTGGCTGATG | |
| f1 T2A Tert240 | GCGACGTGGAAGAGAACCCTGGCCCCGGA | Sense |
| | GCTGCCCCGGAGCCGG | |
| f2 EMCV2A | AGAATCTTCAACGCCCACTACGCCGGCTAC | Sense |
| | TTCGCCGACCTGCTGATCCACGACATCGA | |
| f2 ERBV2A | TGTCTGAGGGCGCCACCAACTTCAGCCTGC | Sense |
| | TGAAACTGGCCGGCGACGTGGAACTG | |
| f2 PTV2A | TTCAGCCTGCTGAAACAGGCCGGCGACGTG | Sense |
| | GAAGAGAACCCTGGCCCT | |
| f2 T2A | CCGGCGAGGGCAGAGGCAGCCTGCTGACA | Sense |
| | TGTGGCGACGTGGAAGAGAACCCTG | |
| pMED_MUC1_F-31 | ACGAACATGGCTAGCACCCCTGGAACCCAG | Sense |
| | AGCCCCTTC | |
| r ERB2A Bamh Muc | TGGTGGCGCCCTCAGACAGGATTGTGCCGG | Antisense |
| | ATCCCAGGTTGGCGGAGGCAGCG | |
| r ERB2A Bamh | TGGTGGCGCCCTCAGACAGGATTGTGCCGG | Antisense |
| Ter240 | ATCCGTCCAAGATGGTCTTGAAATCTGA | |
| r link muc | TCCGCCGGAGCCTCCCAGGTTGGCGGAGG | Antisense |
| | CAGCG | |
| r link Tert240 | TCCGCCGGAGCCTCCGTCCAAGATGGTCTT | Antisense |
| | GAAATCTGA | |
| r muc 986-963 | AAGGACAGAAAGAAGAATGAGACG | Antisense |
| r pmed Bgl Muc | TTGTTTTGTTAGGGCCCAGATCTTCACAGGT | Antisense |
| | TGGCGGAGGCAGCG | |
| r pmed Bgl Ter240 | TTGTTTTGTTAGGGCCCAGATCTTCAGTCCA | Antisense |
| | AGATGGTCTTGAAATCTGA | |
| r PTV2A Bamh Muc | CTGTTTCAGCAGGCTGAAATTGGTGGCGCC | Antisense |
| | GGATCCCAGGTTGGCGGAGGCAGCG | |
| r T2A Tert240 | TGCCTCTGCCCTCGCCGGATCCGTCCAAGA | Antisense |
| | TGGTCTTGAAATCTGA | |
| r tert 1602-1579 | AGGCTGGAGGTCGGTGAGAGTGGA | Antisense |
| r2 T2A | AGGGTTCTCTTCCACGTCGCCACATGTCAG | Antisense |
| | CAGGCTGCCTCTGCCCTCGCCGGATCC | |
| TertΔ343-F | ACGAACATGGCTAGCTTCCTCCTGTCGTCG | Sense |
| | CTCAGACCGAG | |
| Tert-R | TTGTTTTGTTAGGGCCCAGATCTTCAGTCCA | Antisense |
| | AGATGGTCTTGAAATC | |
| TertΔ541-F | ACGAACATGGCTAGCGCCAAATTTCTGCATT | Sense |
| | GGCTGATGTC | |
| r TERT co# pMed | TTGTTTTGTTAGGGCCCAGATCTTCAGTCCA | Antisense |
| | AGATGGTCTTGAAATC | |
| f pmed TERT 241G | ACCCTGTGACGAACATGGGAGCTGCCCCGG | Sense |
| | AGCCGGAGA | |
| ID1197F | ACCCTGTGACGAACATGGCTAGC | Sense |
| ID1197R | AGATCTGGGCCCTAACA | Antisense |
| f cCEA 562-592 | TCCGTGGACCACAGCGACCCTGTGATCCTGA | Sense |
| f CEA 833-855 | CTGTCAAAACTATCACTGTGTCC | Sense |
| f EMC2a CEA d1 | CTTCGCCGACCTGCTGATCCACGACATCGA | Sense |
| | GACAAACCCTGGCCCCAAGCTGACCATTGA | |
| | GAGCACTCCCTTCAAC | |
| f pmed CEA D1 | ACCCTGTGACGAACATGGCTAGCAAGCTGA | Sense |
| | CCATTGAGAGCACTCCCTTCAACGTG | |
| f pmed CEA SS | ACCCTGTGACGAACATGGCTAGCGAATCGC | Sense |
| | CAAGCGCACCCCCTCATCGGTGGTGCATCC | |
| | CTTGGCAACGC | |
| f1 EMC2a CEAss | CTTCGCCGACCTGCTGATCCACGACATCGA | Sense |
| | GACAAACCCTGGCCCCGAATCGCCAAGCGC | |
| | ACCCCCTCATCGGTGG | |
| f1 ERA2A ssCEA | AAGCTGGCCGGCGACGTGGAATCTAACCCT | Sense |
| | GGCCCTGAATCGCCAAGCGCACCCCCTCAT | |
| | CGGTGG | |
| f1 T2a Muc | TGTGGCGACGTGGAAGAGAACCCTGGCCCC | Sense |
| | ACCCCTGGAACCCAGAGCCCCTTCTTCCTT | |
| f2 ERAV2A | TCCGGCCAGTGCACCAATTACGCCCTGCTG | Sense |
| | AAGCTGGCCGGCGACGTGGA | |
| f2 T2A 63 | GGATCCGGCGAGGGCAGAGGCAGCCTGCT | Sense |
| | GACATGTGGCGACGTGGAAGAGAACCCTGG | |
| | CCCC | |
| f CEA D1-D4 | AGGGTGTACCCCGAACTCCCTAAGCCGTTC | Sense |
| | ATCACCTCGAACAACAGCAAC | |
| ID1361-1362_PCRF | ACCCTGTGACGAACATGGCTAGCGAATCGC | Sense |
| | CAAGCGCACCCCCTCATC | |
| r cCEA 849-820 | AGTGATAGTTTTGACAGTGGTGCGGGAGTG | Antisense |
| R CEA SR2 | AACACTTCCTACCGGTCCGGAG | Antisense |
| r EM2A Bamh Muc | GTGGGCGTTGAAGATTCTGCCGGATCCCAG | Antisense |
| | GTTGGCGGAGGCAGCG | |
| r ERA2A Tert | ATTGGTGCACTGGCCGGATCCGTCCAAGAT | Antisense |
| | GGTCTTGAAATCTGA | |
| r pmed CEA D7 | TTGTTTTGTTAGGGCCCAGATCTTCAGGACG | Antisense |
| | CCGACACGGTAATGGACTTCACGA | |
| r pmed CEA GPI | TTGTTTTGTTAGGGCCCAGATCTTCAGATCA | Antisense |
| | GGGCCACTCCCACGAGCAC | |
| r T2a CEA | TCTGCCCTCGCCGGATCCGATCAGGGCCAC | Antisense |
| | TCCCACGAGCACGCCGAT | |
| r T2a CEA D7 | TCTGCCCTCGCCGGATCCGGACGCCGACAC | Antisense |
| | GGTAATGGACTTCACGAT | |
| r T2A furin CEA | TCTGCCCTCGCCGGATCCTCTTCTCTTCCTG | Antisense |
| | ATCAGGGCCACTCCCACGAGCACGCCGAT | |
| r CEA D1 | GAGTTCGGGGTACACCCTGAATTGGCCGGT | Antisense |
| | GGC | |
| ID1361-1362_PCRR | TTGTTAGGGCCCAGATCTTCAGATCAGGGC | Antisense |
| | CACTCCCACGAG | |
| Muc1-20bp-F-98 | CCGCTAGGGTACCGCGATCACCATGGCTAG | Sense |
| | CACCCCTGGAACCCAGAGCCCCTTC | |
| mCEA-20bp-R-100 | TTATGATCAGCTCGAGGTGCGTCAGATCAG | Antisense |
| | GGCCACTCCCACGAGCACGCCGATC | |
| Y-mCEA-S2 | GATCCGCTAGGGTACCGCGATCACCATGGC | Sense |
| | TAGCGAATCGCCAAGCGCACCCCCTCATC | |
| Y-Tert-A2 | GATCAGCTCGAGGTGCGTCAGTCCAAGATG | Antisense |
| | GTCTTGAAATCTGACGGCAATG | |
| Y-Tert-S | GATCCGCTAGGGTACCGCGATCACCATGGC | Sense |
| | TAGCGGAGCTGCCCCGGAGCC | |
| Y-CEA-A | GATCAGCTCGAGGTGCGATTCAGATCAGGG | Antisense |
| | CCACTCCCACGAGCAC | |
| Y-MUC-A | GATCAGCTCGAGGTGCGATTCACAGGTTGG | Antisense |
| | CGGAGGCAGCGGCC | |
| Y-MUC-S2 | GATCCGCTAGGGTACCGCGATCACCATGGC | Sense |
| | TAGCACCCCTGGAACCCAGAGCCCCTTC | |
| cCEA-20bp-F-106 | GATCCGCTAGGGTACCGCGATCACCATGGC | Sense |
| | TAGCAAGCTGACCATTGAGAGCACTC | |
| Muc1-20BP-R-108 | GATTATGATCAGCTCGAGGTGCGTCACAGG | Antisense |
| | TTGGCGGAGGCAGCGGCCACGGCAGG | |

TABLE 17
2A-peptide Sequences

| Virus | 2A-peptide Sequence |
|---|---|
| Foot and mouse disease | VKQTLNFDLLKLAGDVESNPG |
| virus (FMDV) | |
| Equine rhinitis A virus | QCTNYALLKLAGDVESNPG |
| (ERAV) | |
| Porcine teschovirus-1 | ATNF-SLLKQAGDVEENPG |
| (PTV1) | |
| Encephalomyocarditis | HYAGYFADLLIHDIETNPG |
| virus (EMCV) | |
| Encephalomyocarditis B | GIFN-AHYAGYFADLLIHDIETNPG |
| variant (EMC-B) | |
| Theiler murine | KAVRGYHADYYKQRLIHDVEMNPG |
| encephalomyelitis GD7 | |
| (TME-GD7) | |
| Equine rhinitis B virus | GATNF-SLLKLAGDVELNPG |
| (ERBV) | |
| Thosea asigna virus | EGRGSLLTCGDVEENPG |
| (TAV) | |
| Drosophilia C (DrosC) | AARQMLLLLSGDVETNPG |
| Cricket paralysis virus | FLRKRTQLLMSGDVESNPG |
| (CrPV) | |
| Acute bee paralysis | GSWTDILLLLSGDVETNPG |
| virus (ABPV) | |
| Infectious flacherie | TRAEIEDELIRAGIESNPG |
| virus (IFV) | |
| Porcine rotavirus | AKFQIDKILISGDVELNPG |
| Human rotavirus | SKFQIDKILISGDIELNPG |
| T. brucei TSR1 | SSIIRTKMLVSGDVEENPG |
| T. cruzi AP endonuclease | CDAQRQKLLLSGDIEQNPG |

TABLE 18
Sequence Index

| SEQ ID NO | Description |
|---|---|
| 1 | Amino acid sequence of human MUC1 Isoform 1 precursor protein |
| | (Reference Polypeptide; Uniprot P15941-1) |
| 2 | Amino acid sequence of human CEA Isoform 1 precursor protein |
| | (Reference Polypeptide; Uniprot P06731-1 (702 aa) |
| 3 | Amino acid sequence of human TERT Isoform 1 precursor protein |
| | (Reference Polypeptide; Genbank AAD30037, Uniprot O14746-1) |
| 4 | Plasmid 1027 (MUC1) - ORF nucleotide sequence (DNA) |
| 5 | Plasmid 1027 (MUC1) - encoded amino acid sequence |
| 6 | Plasmid 1197 (cMUC1) - ORF nucleotide sequence (DNA) |
| 7 | Plasmid 1197 (cMUC1) - encoded amino acid sequence |
| 8 | Plasmid 1112 (TERT240) - ORF nucleotide sequence (DNA) |
| 9 | Plasmid 1112 (TERT240) - encoded amino acid sequence |
| 10 | Plasmid 1326 (TERT343) - ORF nucleotide sequence (DNA) |
| 11 | Plasmid 1326 (TERT343) - encoded amino acid sequence |
| 12 | Plasmid 1330 (TERT541) - ORF nucleotide sequence (DNA) |
| 13 | Plasmid 1330 (TERT541) - encoded amino acid sequence |
| 14 | Plasmid 1361 (CEA) - ORF nucleotide sequence (DNA) |
| 15 | Plasmid 1361 (CEA) - encoded amino acid sequence |
| 16 | Plasmid 1386 (mCEA) - ORF nucleotide sequence (DNA) |
| 17 | Plasmid 1386 (mCEA) - encoded amino acid sequence |
| 18 | Plasmid 1390 (cCEA) - ORF nucleotide sequence (DNA) |
| 19 | Plasmid 1390 (cCEA) - encoded amino acid sequence |
| 20 | Plasmid 1269 (Muc1 - Tert240) - ORF nucleotide sequence (DNA) |
| 21 | Plasmid 1269 (Muc1 - Tert240) - encoded amino acid sequence |
| 22 | Plasmid 1270 (Muc1 - ERB2A- Tert240) - ORF nucleotide sequence (DNA) |
| 23 | Plasmid 1270 (Muc1 - ERB2A- Tert240) - encoded amino acid sequence |
| 24 | Plasmid 1271 (Tert240 - ERB2A - Muc1) - ORF nucleotide sequence (DNA) |
| 25 | Plasmid 1271 (Tert240 - ERB2A - Muc1) - encoded amino acid sequence |
| 26 | Plasmid 1286 (cMuc1 - ERB2A - Tert240) - ORF nucleotide sequence (DNA) |
| 27 | Plasmid 1286 (cMuc1 - ERB2A - Tert240) - encoded amino acid sequence |
| 28 | Plasmid 1287 (Tert240 - ERB2A - cMuc1) - ORF nucleotide sequence (DNA) |
| 29 | Plasmid 1287 (Tert240 - ERB2A - cMuc1) - encoded amino acid sequence |
| 30 | Plasmid 1409 (Muc1 - EMC2A - mCEA) - ORF nucleotide sequence (DNA) |
| 31 | Plasmid 1409 (Muc1 - EMC2A - mCEA) - encoded amino acid sequence |
| 32 | Plasmid 1410 (mCEA - T2A - Muc1) - ORF nucleotide sequence (DNA) |
| 33 | Plasmid 1410 (mCEA - T2A - Muc1) - encoded amino acid sequence |
| 34 | Plasmid 1411 (mCEA - Furin - T2A - Muc1) - ORF nucleotide sequence (DNA) |
| 35 | Plasmid 1411 (mCEA - Furin - T2A - Muc1) - encoded amino acid sequence |
| 36 | Plasmid 1431 (Muc1 - EMC2A- cCEA) - ORF nucleotide sequence (DNA) |
| 37 | Plasmid 1431 (Muc1 - EMC2A - cCEA) - encoded amino acid sequence |
| 38 | Plasmid 1432 (cCEA - T2A - Tert240) - ORF nucleotide sequence (DNA) |
| 39 | Plasmid 1432 (cCEA - T2A - Tert240) - encoded amino acid sequence |
| 40 | Plasmid 1440 (Tert240 - ERA2A - mCEA) - ORF nucleotide sequence (DNA) |
| 41 | Plasmid 1440 (Tert240 - ERA2A - mCEA) - encoded amino acid sequence |
| 42 | Plasmid 1424 (Muc1-ERB2A -Tert240- ERA2A- mCEA) - ORF nucleotide sequence (DNA) |
| 43 | Plasmid 1424 (Muc1- ERB2A - Tert240 -ERA2A- mCEA) - encoded amino acid sequence |
| 44 | Plasmid 1425 (mCEA- T2A - Muc1 - ERB2A - Tert240) - ORF nucleotide sequence (DNA) |
| 45 | Plasmid 1425 (mCEA -T2A - Muc1 - ERB2A -Tert240) - encoded amino acid sequence |
| 46 | Plasmid 1426 (Tert240 - ERB2A- Muc1- EMC2A - mCEA) - ORF nucleotide sequence (DNA) |
| 47 | Plasmid 1426 (Tert240 - ERB2A - Muc1 - EMC2A - mCEA) - encoded amino acid sequence |
| 48 | Plasmid 1427 (Tert240 - ERA2A - mCEA - T2A - Muc1) - ORF nucleotide sequence (DNA) |
| 49 | Plasmid 1427 (Tert240 - ERA2A - mCEA - T2A - Muc1) - encoded amino acid sequence |
| 50 | Plasmid 1428 (Muc1 - EMC2A - cCEA - T2A - Tert240) - ORF nucleotide sequence (DNA) |
| 51 | Plasmid 1428 (Muc1 - EMC2A - cCEA - T2A - Tert240) - encoded amino acid sequence |
| 52 | Plasmid 1429 (cCEA - T2A - Tert240 - ERB2A - Muc1) - ORF nucleotide sequence (DNA) |
| 53 | Plasmid 1429 (cCEA - T2A - Tert240 - ERB2A - Muc1) - encoded amino acid sequence |
| 54 | Plasmid 1361 - complete vector nucleotide sequence (DNA) |
| 55 | Plasmid 1390 - complete vector nucleotide sequence (DNA) |
| 56 | Plasmid 1386 - complete vector nucleotide sequence (DNA) |
| 57 | Plasmid 1424 - complete vector nucleotide sequence (DNA) |
| 58 | AdC68-1424 - complete vector nucleotide sequence (DNA) |
| 59 | Plasmid 1425 - complete vector nucleotide sequence (DNA) |
| 60 | AdC68-1425 - complete vector nucleotide sequence (DNA) |
| 61 | Plasmid 1426 - complete vector nucleotide sequence (DNA) |
| 62 | AdC68-1426 - complete vector nucleotide sequence (DNA) |
| 63 | Plasmid 1427 complete vector nucleotide sequence (DNA) |
| 64 | AdC68-1427 - complete vector nucleotide sequence (DNA) |
| 65 | Plasmid 1428 - complete vector nucleotide sequence (DNA) |
| 66 | AdC68-1428 - complete vector nucleotide sequence (DNA) |
| 67 | Plasmid 1429 - complete vector nucleotide sequence (DNA) |
| 68 | AdC68-1429 - complete vector nucleotide sequence (DNA) |
| 69 | Plasmid 1409 - complete vector nucleotide sequence (DNA) |
| 70 | Plasmid 1410 - complete vector nucleotide sequence (DNA) |
| 71 | Plasmid 1411 - complete vector nucleotide sequence (DNA) |
| 72 | Plasmid 1431 - complete vector nucleotide sequence (DNA) |
| 73 | Plasmid 1432 - complete vector nucleotide sequence (DNA) |
| 74 | Plasmid 1440 - complete vector nucleotide sequence (DNA) |
| 75 | AdC68Y Empty vector nucleotide sequence (without the transgene insert) (DNA) |
| 76 | Encephalomyocarditis Virus 2A (EMC2A) amino acid sequence |
| 77 | Equine rhinitis A virus 2A (ERA2A) amino acid sequence |
| 78 | Equine Rhinitis B Virus 2A (ERB2A) amino acid sequence |
| 79 | Porcine Teschovirus 2A (PT2A) amino acid sequence |
| 80 | Thosea Asigna Virus 2A (TA2A or T2A) amino acid sequence |
| 81 | Plasmid 1065 (TERT D712A/V713I) - encoded amino acid sequence |
| 82 | Plasmid 1065 - ORF nucleotide sequence (DNA) |
| 83 | Plasmid 1065 - complete vector nucleotide sequence (DNA) |
| 84 | Plasmid 1027 - ORF nucleotide sequence (RNA) |
| 85 | Plasmid 1112 - ORF nucleotide sequence (RNA) |
| 86 | Plasmid 1390 - ORF nucleotide sequence (RNA) |
| 87 | Plasmid 1424 - ORF nucleotide sequence (RNA) |
| 88 | Plasmid 1425 - ORF nucleotide sequence (RNA) |
| 89 | Plasmid 1426 - ORF nucleotide sequence (RNA) |
| 90 | Plasmid 1427 - ORF nucleotide sequence (RNA) |
| 91 | Plasmid 1428 - ORF nucleotide sequence (RNA) |
| 92 | Plasmid 1429 - ORF nucleotide sequence (RNA) |
| 93 | Encephalomyocarditis virus (EMCV) IRES sequence (RNA) |

RAW SEQUENCE LISTING (PARTIAL)
Plasmid 1027 ORF (MUC1)

SEQ ID NO: 4

atggctagcacccctggaacccagagccccttcttccttctgctgctgctgaccgtgctgactgtcgtgacaggctctggccacgccagctc
tacacctggcggcgagaaagagacaagcgccacccagagaagcagcgtgccaagcagcaccgagaagaacgccgtgtccatgacca
gctccgtgctgagcagccactctcctggcagcggcagcagcacaacacagggccaggatgtgacactggcccctgccacagaacctgc
ctctggatctgccgccacctggggacaggacgtgacaagcgtgccagtgaccagacctgccctgggctctacaacaccccctgcccacg
atgtgaccagcgcccctgataacaagcctgcccctggaagcacagcccctccagctcatggcgtgacctctgccccagataccagacca
gccccaggatctacagccccacccgcacacggcgtgacaagtgcccctgacacaagacccgctccaggctctactgctcctcctgcccat
ggcgtgacaagcgctcccgatacaaggccagctcctggctccacagcaccaccagcacatggcgtgacatcagctcccgacactagacc
tgctcccggatcaaccgctccaccagctcacggcgtgaccagcgcacctgataccagacctgctctgggaagcaccgcccctcccgtgc
acaatgtgacatctgcttccggcagcgccagcggctctgcctctacactggtgcacaacggcaccagcgccagagccacaacaacccca
gccagcaagagcacccccttcagcatccctagccaccacagcgacacccctaccacactggccagccactccaccaagaccgatgcctc
tagcacccaccactccagcgtgccccctctgaccagcagcaaccacagcacaagcccccagctgtctaccggcgtctcattcttctttctgt
ccttccacatcagcaacctgcagttcaacagcagcctggaagatcccagcaccgactactaccaggaactgcagcgggatatcagcgag
atgttcctgcaaatctacaagcagggcggcttcctgggcctgagcaacatcaagttcagacccggcagcgtggtggtgcagctgaccctg
gctttccgggaaggcaccatcaacgtgcacgacgtggaaacccagttcaaccagtacaagaccgaggccgccagccggtacaacctga
ccatctccgatgtgtccgtgtccgacgtgcccttcccattctctgcccagtctggcgcaggcgtgccaggatggggaattgctctgctggtgc
tcgtgtgcgtgctggtggccctggccatcgtgtatctgattgccctggccgtgtgccagtgccggcggaagaattacggccagctggacat
cttccccgccagagacacctaccaccccatgagcgagtaccccacataccacacccacggcagatacgtgccacccagctccaccgaca
gatccccctacgagaaagtgtctgccggcaacggcggcagctccctgagctacacaaatcctgccgtggccgctgcctccgccaacctg.
Plasmid 1027 Polypeptide (MUC1)

SEQ ID NO: 5

MASTPGTQSPFFLLLLLTVLTVVTGSGHASSTPGGEKETSATQRSSVPSSTEKNAVSMTS
SVLSSHSPGSGSSTTQGQDVTLAPATEPASGSAATWGQDVTSVPVTRPALGSTTPPAHD
VTSAPDNKPAPGSTAPPAHGVTSAPDTRPAPGSTAPPAHGVTSAPDTRPAPGSTAPPAHG
VTSAPDTRPAPGSTAPPAHGVTSAPDTRPAPGSTAPPAHGVTSAPDTRPALGSTAPPVHN
VTSASGSASGSASTLVHNGTSARATTTPASKSTPFSIPSHHSDTPTTLASHSTKTDASSTH
HSSVPPLTSSNHSTSPQLSTGVSFFFLSFHISNLQFNSSLEDPSTDYYQELQRDISEMFLQI
YKQGGFLGLSNIKFRPGSVVVQLTLAFREGTINVHDVETQFNQYKTEAASRYNLTISDV
SVSDVPFPFSAQSGAGVPGWGIALLVLVCVLVALAIVYLIALAVCQCRRKNYGQLDIFP
ARDTYHPMSEYPTYHTHGRYVPPSSTDRSPYEKVSAGNGGSSLSYTNPAVAAASANL.
Plasmid 1112 ORF (TERT240)

SEQ ID NO: 8

atgggagctgccccggagccggagaggacccccgttggccagggatcgtgggcccatccgggacgcaccaggggaccatccgacag
gggattctgtgtggtgtcaccggccaggccagcagaagaggcaaccagcctcgagggagcgttgtctggaaccagacattcccacccgt
cggtgggccggcagcaccacgcgggaccaccgtccacttccagaccgccacggccatgggacaccccttgcccgcctgtgtatgccga
gactaaacacttcctgtactcatccggagacaaggaacagcttcggccgtccttcctcctgtcgtcgctcagaccgagcctgaccggagca
cgcagattggtggaaactatcttccttgggtcacgtccgtggatgccaggtaccccacggcgcctcccgcgcctcccacagagatactggc
agatgcggcctctgttcctggaattgctgggaaaccacgctcagtgcccgtacggagtcctgctcaagactcactgccctctgagggcggc
ggtcactccggcggccggagtgtgcgcacgggagaagccccagggaagcgtggcagctccggaagaggaggacaccgatccgcgc
cgcctcgtgcaacttctgcgccagcactcctcgccctggcaagtctacgggttcgtccgcgcctgcctgcgccgcctggtgccgcctggg
ctctggggttcccggcataacgagcgccgcttcctgagaaatactaagaagtttatctcacttggaaaacatgccaagttgtcgctgcaagaa
ctcacgtggaagatgtcagtccgcgattgcgcctggctgcgccgctcgccgggcgtcgggtgtgttccagctgcagaacaccgcctgaga
gaagaaattctggccaaatttctgcattggctgatgtcagtgtacgtggtcgagctgctgcgctcctttttctacgtcactgagactacctttcaa
aagaaccgcctgttcttctaccgcaaatctgtgtggagcaagctgcagtcaatcggcattcgccagcatctgaagagggtgcagctgcggg
aactttccgaggcagaagtccgccagcaccgggaggcccggccggcgcttctcacgtcgcgtctgagattcatcccaaagcccgacggg
ctgaggcctatcgtcaacatggattacgtcgtgggcgctcgcacctttcgccgtgaaaagcgggccgaacgcttgacctcacgggtgaag
gccctcttctccgtgctgaactacgagagagcaagacggcctggcctgctgggagcttcggtgctgggactggacgatatccaccgggct
tggcggacctttgttctccgggtgagagcccaagaccctccgccggaactgtacttcgtgaaggtggcgatcaccggagcctatgatactat
tccgcaagatcgactcaccgaagtcatcgcctcgatcatcaaaccgcagaacacttactgcgtcaggcggtacgccgtggtccagaaggc
cgcgcatggccacgtgagaaaggcgttcaagtcgcacgtgtccactctcaccgacctccagccttacatgaggcaattcgttgcgcatttgc
aagagacttcgcccctgagagatgcggtggtcatcgagcagagctccagcctgaacgaagcgagcagcggtctgtttgacgtgttcctcc
gcttcatgtgtcatcacgcggtgcgaatcaggggaaaatcatacgtgcagtgccagggaatcccacaaggcagcattctgtcgactctcttg
tgttccctttgctacggcgatatggaaaacaagctgttcgctgggatcagacgggacgggttgctgctcagactggtggacgacttcctgct
ggtgactccgcacctcactcacgccaaaacctttctccgcactctggtgaggggagtgccagaatacggctgtgtggtcaatctccggaaa
actgtggtgaatttccctgtcgaggatgaggcactcggaggaaccgcatttgtccaaatgccagcacatggcctgttcccatggtgcggtct
gctgctggacacccgaactcttgaagtgcagtccgactactccagctatgcccggacgagcatccgcgccagcctcactttcaatcgcggc
tttaaggccggacgaaacatgcgcagaaagcttttcggagtcctccggcttaaatgccattcgctctttctcgatctccaagtcaattcgctgc
agaccgtgtgcacgaacatctacaagatcctgctgctccaagcctaccggttccacgcttgcgtgcttcagctgccgtttcaccaacaggtgt
ggaagaacccgaccttctttctgcgggtcattagcgatactgcctccctgtgttactcaatcctcaaggcaaagaacgccggaatgtcgctg
ggtgcgaaaggagccgcgggacctcttcctagcgaagcggtgcagtggctctgccaccaggctttcctcctgaagctgaccaggcacag
agtgacctacgtcccgctgctgggctcgctgcgcactgcacagacccagctgtctagaaaactccccggcaccaccctgaccgctctgga
agccgccgccaacccagcattgccgtcagatttcaagaccatcttggac.
Plasmid 1112 Polypeptide (TERT240)

SEQ ID NO: 9

MGAAPEPERTPVGQGSWAHPGRTRGPSDRGFCVVSPARPAEEATSLEGALSGTRHSHPS
VGRQHHAGPPSTSRPPRPWDTPCPPVYAETKHFLYSSGDKEQLRPSFLLSSLRPSLTGAR
RLVETIFLGSRPWMPGTPRRLPRLPQRYWQMRPLFLELLGNHAQCPYGVLLKTHCPLRA
AVTPAAGVCAREKPQGSVAAPEEEDTDPRRLVQLLRQHSSPWQVYGFVRACLRRLVPP
GLWGSRHNERRFLRNTKKFISLGKHAKLSLQELTWKMSVRDCAWLRRSPGVGCVPAA
EHRLREEILAKFLHWLMSVYVVELLRSFFYVTETTFQKNRLFFYRKSVWSKLQSIGIRQH
LKRVQLRELSEAEVRQHREARPALLTSRLRFIPKPDGLRPIVNMDYVVGARTFRREKRA
ERLTSRVKALFSVLNYERARRPGLLGASVLGLDDIHRAWRTFVLRVRAQDPPPELYFVK
VAITGAYDTIPQDRLTEVIASIIKPQNTYCVRRYAVVQKAAHGHVRKAFKSHVSTLTDL
QPYMRQFVAHLQETSPLRDAVVIEQSSSLNEASSGLFDVFLRFMCHHAVRIRGKSYVQC
QGIPQGSILSTLLCSLCYGDMENKLFAGIRRDGLLLRLVDDFLLVTPHLTHAKTFLRTLV
RGVPEYGCVVNLRKTVVNFPVEDEALGGTAFVQMPAHGLFPWCGLLLDTRTLEVQSD
YSSYARTSIRASLTFNRGFKAGRNMRRKLFGVLRLKCHSLFLDLQVNSLQTVCTNIYKIL
LLQAYRFHACVLQLPFHQQVWKNPTFFLRVISDTASLCYSILKAKNAGMSLGAKGAAG
PLPSEAVQWLCHQAFLLKLTRHRVTYVPLLGSLRTAQTQLSRKLPGTTLTALEAAANPA
LPSDFKTILD.
Plasmid 1361 ORF (nucleotide sequence)

SEQ ID NO: 14

atggctagcgaatcgccaagcgcaccccctcatcggtggtgcatcccttggcaacgcctcctcctgaccgcctcactgctgactttctggaa
cccgccgaccaccgcaaagctgaccattgagagcactcccttcaacgtggctgaggggaaggaggtgctgctcctggtgcacaatctgc
cccagcacctgttcgggtactcctggtacaagggagaacgcgtggacgggaaccggcagatcataggctacgtcatcggaacccagca
ggccacacccggtccagcgtacagcggccgggagattatctacccgaacgcctccctgctgatccaaaacatcatccagaacgacaccg
gtttctacactctgcacgtgattaagtcagatctggtcaacgaagaggccaccggccaattcagggtgtaccccgaactcccaaagccgtcc
atttcaagcaacaactccaagccggtggaggacaaagacgccgtggccttcacttgtgaacctgaaacccaggacgccacttacctttggt
gggtgaacaaccagtcgctccccgtgtcgccgaggctgcagctcagcaacggaaacagaacgctgaccctcttcaatgtgacccgcaat
gataccgcctcctataagtgcgaaacccagaatccggtgtccgcccggcgctcggatagcgtgattctgaacgtgctctacggccctgacg
cccccactatctcccctctgaacacttcctaccggtccggagagaacctgaacctgagctgccacgcggcgtccaacccgcccgcccagt
acagctggttcgtgaatgggacgttccagcagtccacccaggagctgtttatccctaacattaccgtcaacaactctggatcgtacacatgcc
aagcgcataactcggacactgggcttaacagaaccaccgtgacaaccatcactgtgtatgcggaacctcctaagccgttcatcacctcgaa
caacagcaacccggtcgaggatgaagatgcggtggccttgacgtgcgaacctgagatccagaacaccacctacttgtggtgggtgaaca
atcagagcctgccagtctccccacgactccagctgtcgaacgacaacaggaccctgactttgctgtccgtgactcggaacgacgtgggcc
cttatgaatgcggtatccagaacaagctgtccgtggaccacagcgaccctgtgatcctgaacgtcctttacgggccggacgaccccaccat
ttccccgtcgtacacttactaccggccgggcgtgaacctgtccctgtcgtgccacgctgcctccaatccgccggcccagtactcctggctca
tcgacggaaacatccagcagcacacccaagaactgttcatctccaacattaccgagaaaaactcgggactttacacctgtcaagccaacaa
ttccgccagcggccactcccgcaccactgtcaaaactatcactgtgtccgccgaactcccgaagcccagcatcagctccaacaactcgaa
gcccgtggaggataaggacgctgtcgcgttcacctgtgaaccagaggcacagaataccacctacctttggtgggtcaacggacagtccct
gcctgtctcaccgagactgcagctgtcaaacgggaataggactctgaccttgtttaacgtcacccggaacgacgcccgggcctacgtgtgc
ggcatccagaactccgtgagcgcaaaccggtctgacccagtgaccctggatgtgctgtacggccccgacactccgatcatttcacccccc
gattcatcctacctgtccggcgctaacctcaacctctcatgccactccgcatccaaccccagcccgcaatattcgtggcgcattaacggaatt
cctcagcaacatacccaggtcctgttcattgcgaagatcacccctaacaacaacggaacctacgcctgctttgtgtcaaacctggccactgg
tagaaacaactccatcgtgaagtccattaccgtgtcggcgtccggaacttccccgggcctgagcgccggcgccaccgtgggaattatgatc
ggcgtgctcgtgggagtggccctgatc.
Plasmid 1361 Polypeptide

SEQ ID NO: 15

MASESPSAPPHRWCIPWQRLLLTASLLTFWNPPTTAKLTIESTPFNVAEGKEVLLLVHNL
PQHLFGYSWYKGERVDGNRQIIGYVIGTQQATPGPAYSGREIIYPNASLLIQNIIQNDTGF
YTLHVIKSDLVNEEATGQFRVYPELPKPSISSNNSKPVEDKDAVAFTCEPETQDATYLW
WVNNQSLPVSPRLQLSNGNRTLTLFNVTRNDTASYKCETQNPVSARRSDSVILNVLYGP
DAPTISPLNTSYRSGENLNLSCHAASNPPAQYSWFVNGTFQQSTQELFIPNITVNNSGSYT
CQAHNSDTGLNRTTVTTITVYAEPPKPFITSNNSNPVEDEDAVALTCEPEIQNTTYLWW
VNNQSLPVSPRLQLSNDNRTLTLLSVTRNDVGPYECGIQNKLSVDHSDPVILNVLYGPD
DPTISPSYTYYRPGVNLSLSCHAASNPPAQYSWLIDGNIQQHTQELFISNITEKNSGLYTC
QANNSASGHSRTTVKTITVSAELPKPSISSNNSKPVEDKDAVAFTCEPEAQNTTYLWWV
NGQSLPVSPRLQLSNGNRTLTLFNVTRNDARAYVCGIQNSVSANRSDPVTLDVLYGPDT
PIISPPDSSYLSGANLNLSCHSASNPSPQYSWRINGIPQQHTQVLFIAKITPNNNGTYACFV
SNLATGRNNSIVKSITVSASGTSPGLSAGATVGIMIGVLVGVALI.
Plasmid 1386 ORF (mCEA)

SEQ ID NO: 16

atggctagcgaatcgccaagcgcaccccctcatcggtggtgcatcccttggcaacgcctcctcctgaccgcctcactgctgactttctggaa
cccgccgaccaccgcaaagctgaccattgagagcactcccttcaacgtggctgaggggaaggaggtgctgctcctggtgcacaatctgc
cccagcacctgttcgggtactcctggtacaagggagaacgcgtggacgggaaccggcagatcataggctacgtcatcggaacccagca
ggccacacccggtccagcgtacagcggccgggagattatctacccgaacgcctccctgctgatccaaaacatcatccagaacgacaccg
gtttctacactctgcacgtgattaagtcagatctggtcaacgaagaggccaccggccaattcagggtgtaccccgaactccctaagccgttc
atcacctcgaacaacagcaacccggtcgaggatgaagatgcggtggccttgacgtgcgaacctgagatccagaacaccacctacttgtgg
tgggtgaacaatcagagcctgccagtctccccacgactccagctgtcgaacgacaacaggaccctgactttgctgtccgtgactcggaacg
acgtgggcccttatgaatgcggtatccagaacaagctgtccgtggaccacagcgaccctgtgatcctgaacgtcctttacgggccggacga
ccccaccatttccccgtcgtacacttactaccggccgggcgtgaacctgtccctgtcgtgccacgctgcctccaatccgccggcccagtact
cctggctcatcgacggaaacatccagcagcacacccaagaactgttcatctccaacattaccgagaaaaactcgggactttacacctgtcaa
gccaacaattccgccagcggccactcccgcaccactgtcaaaactatcactgtgtccgccgaactcccgaagcccagcatcagctccaac
aactcgaagcccgtggaggataaggacgctgtcgcgttcacctgtgaaccagaggcacagaataccacctacctttggtgggtcaacgga
cagtccctgcctgtctcaccgagactgcagctgtcaaacgggaataggactctgaccttgtttaacgtcacccggaacgacgcccgggcct
acgtgtgcggcatccagaactccgtgagcgcaaaccggtctgacccagtgaccctggatgtgctgtacggccccgacactccgatcatttc
accccccgattcatcctacctgtccggcgctaacctcaacctctcatgccactccgcatccaaccccagcccgcaatattcgtggcgcattaa
cggaattcctcagcaacatacccaggtcctgttcattgcgaagatcacccctaacaacaacggaacctacgcctgctttgtgtcaaacctgg
ccactggtagaaacaactccatcgtgaagtccattaccgtgtcggcgtccggaacttccccgggcctgagcgccggcgccaccgtggga
attatgatcggcgtgctcgtgggagtggccctgatc.
Plasmid 1386 Polypeptide (mCEA)

SEQ ID NO: 17

MASESPSAPPHRWCIPWQRLLLTASLLTFWNPPTTAKLTIESTPFNVAEGKEVLLLVHNL
PQHLFGYSWYKGERVDGNRQIIGYVIGTQQATPGPAYSGREIIYPNASLLIQNIIQNDTGF
YTLHVIKSDLVNEEATGQFRVYPELPKPFITSNNSNPVEDEDAVALTCEPEIQNTTYLWW
VNNQSLPVSPRLQLSNDNRTLTLLSVTRNDVGPYECGIQNKLSVDHSDPVILNVLYGPD
DPTISPSYTYYRPGVNLSLSCHAASNPPAQYSWLIDGNIQQHTQELFISNITEKNSGLYTC
QANNSASGHSRTTVKTITVSAELPKPSISSNNSKPVEDKDAVAFTCEPEAQNTTYLWWV
NGQSLPVSPRLQLSNGNRTLTLFNVTRNDARAYVCGIQNSVSANRSDPVTLDVLYGPDT
PIISPPDSSYLSGANLNLSCHSASNPSPQYSWRINGIPQQHTQVLFIAKITPNNNGTYACFV
SNLATGRNNSIVKSITVSASGTSPGLSAGATVGIMIGVLVGVALI.
Plasmid 1390 ORF (cCEA)

SEQ ID NO: 18

atggctagcaagctgaccattgagagcactcccttcaacgtggctgaggggaaggaggtgctgctcctggtgcacaatctgccccagcac
ctgttcgggtactcctggtacaagggagaacgcgtggacgggaaccggcagatcataggctacgtcatcggaacccagcaggccacac
ccggtccagcgtacagcggccgggagattatctacccgaacgcctccctgctgatccaaaacatcatccagaacgacaccggtttctacac
tctgcacgtgattaagtcagatctggtcaacgaagaggccaccggccaattcagggtgtaccccgaactccctaagccgttcatcacctcga
acaacagcaacccggtcgaggatgaagatgcggtggccttgacgtgcgaacctgagatccagaacaccacctacttgtggtgggtgaac
aatcagagcctgccagtctccccacgactccagctgtcgaacgacaacaggaccctgactttgctgtccgtgactcggaacgacgtgggc
ccttatgaatgcggtatccagaacaagctgtccgtggaccacagcgaccctgtgatcctgaacgtcctttacgggccggacgaccccacca
tttccccgtcgtacacttactaccggccgggcgtgaacctgtccctgtcgtgccacgctgcctccaatccgccggcccagtactcctggctc
atcgacggaaacatccagcagcacacccaagaactgttcatctccaacattaccgagaaaaactcgggactttacacctgtcaagccaaca
attccgccagcggccactcccgcaccactgtcaaaactatcactgtgtccgccgaactcccgaagcccagcatcagctccaacaactcga
agcccgtggaggataaggacgctgtcgcgttcacctgtgaaccagaggcacagaataccacctacctttggtgggtcaacggacagtccc
tgcctgtctcaccgagactgcagctgtcaaacgggaataggactctgaccttgtttaacgtcacccggaacgacgcccgggcctacgtgtg
cggcatccagaactccgtgagcgcaaaccggtctgacccagtgaccctggatgtgctgtacggccccgacactccgatcatttcaccccc
cgattcatcctacctgtccggcgctaacctcaacctctcatgccactccgcatccaaccccagcccgcaatattcgtggcgcattaacggaat
tcctcagcaacatacccaggtcctgttcattgcgaagatcacccctaacaacaacggaacctacgcctgctttgtgtcaaacctggccactg
gtagaaacaactccatcgtgaagtccattaccgtgtcggcgtcc.
Plasmid 1390 Polypeptide (cCEA)

SEQ ID NO: 19

MASKLTIESTPFNVAEGKEVLLLVHNLPQHLFGYSWYKGERVDGNRQIIGYVIGTQQAT
PGPAYSGREIIYPNASLLIQNIIQNDTGFYTLHVIKSDLVNEEATGQFRVYPELPKPFITSN
NSNPVEDEDAVALTCEPEIQNTTYLWWVNNQSLPVSPRLQLSNDNRTLTLLSVTRNDV
GPYECGIQNKLSVDHSDPVILNVLYGPDDPTISPSYTYYRPGVNLSLSCHAASNPPAQYS
WLIDGNIQQHTQELFISNITEKNSGLYTCQANNSASGHSRTTVKTITVSAELPKPSISSNNS
KPVEDKDAVAFTCEPEAQNTTYLWWVNGQSLPVSPRLQLSNGNRTLTLFNVTRNDAR
AYVCGIQNSVSANRSDPVTLDVLYGPDTPIISPPDSSYLSGANLNLSCHSASNPSPQYSW
RINGIPQQHTQVLFIAKITPNNNGTYACFVSNLATGRNNSIVKSITVSAS.
Plasmid 1431 ORF (nucleotide sequence)

SEQ ID NO: 36

atggctagcacccctggaacccagagccccttcttccttctgctgctgctgaccgtgctgactgtcgtgacaggctctggccacgccagctc
tacacctggcggcgagaaagagacaagcgccacccagagaagcagcgtgccaagcagcaccgagaagaacgccgtgtccatgacca
gctccgtgctgagcagccactctcctggcagcggcagcagcacaacacagggccaggatgtgacactggcccctgccacagaacctgc
ctctggatctgccgccacctggggacaggacgtgacaagcgtgccagtgaccagacctgccctgggctctacaacaccccctgcccacg
atgtgaccagcgcccctgataacaagcctgcccctggaagcacagcccctccagctcatggcgtgacctctgccccagataccagacca
gccccaggatctacagccccacccgcacacggcgtgacaagtgcccctgacacaagacccgctccaggctctactgctcctcctgcccat
ggcgtgacaagcgctcccgatacaaggccagctcctggctccacagcaccaccagcacatggcgtgacatcagctcccgacactagacc
tgctcccggatcaaccgctccaccagctcacggcgtgaccagcgcacctgataccagacctgctctgggaagcaccgcccctcccgtgc
acaatgtgacatctgcttccggcagcgccagcggctctgcctctacactggtgcacaacggcaccagcgccagagccacaacaacccca
gccagcaagagcacccccttcagcatccctagccaccacagcgacacccctaccacactggccagccactccaccaagaccgatgcctc
tagcacccaccactccagcgtgccccctctgaccagcagcaaccacagcacaagcccccagctgtctaccggcgtctcattcttctttctgt
ccttccacatcagcaacctgcagttcaacagcagcctggaagatcccagcaccgactactaccaggaactgcagcgggatatcagcgag
atgttcctgcaaatctacaagcagggcggcttcctgggcctgagcaacatcaagttcagacccggcagcgtggtggtgcagctgaccctg
gctttccgggaaggcaccatcaacgtgcacgacgtggaaacccagttcaaccagtacaagaccgaggccgccagccggtacaacctga
ccatctccgatgtgtccgtgtccgacgtgcccttcccattctctgcccagtctggcgcaggcgtgccaggatggggaattgctctgctggtgc
tcgtgtgcgtgctggtggccctggccatcgtgtatctgattgccctggccgtgtgccagtgccggcggaagaattacggccagctggacat
cttccccgccagagacacctaccaccccatgagcgagtaccccacataccacacccacggcagatacgtgccacccagctccaccgaca
gatccccctacgagaaagtgtctgccggcaacggcggcagctccctgagctacacaaatcctgccgtggccgctgcctccgccaacctg
ggatccggcagaatcttcaacgcccactacgccggctacttcgccgacctgctgatccacgacatcgagacaaaccctggccccaagctg
accattgagagcactcccttcaacgtggctgaggggaaggaggtgctgctcctggtgcacaatctgccccagcacctgttcgggtactcct
ggtacaagggagaacgcgtggacgggaaccggcagatcataggctacgtcatcggaacccagcaggccacacccggtccagcgtaca
gcggccgggagattatctacccgaacgcctccctgctgatccaaaacatcatccagaacgacaccggtttctacactctgcacgtgattaag
tcagatctggtcaacgaagaggccaccggccaattcagggtgtaccccgaactccctaagccgttcatcacctcgaacaacagcaacccg
gtcgaggatgaagatgcggtggccttgacgtgcgaacctgagatccagaacaccacctacttgtggtgggtgaacaatcagagcctgcca
gtctccccacgactccagctgtcgaacgacaacaggaccctgactttgctgtccgtgactcggaacgacgtgggcccttatgaatgcggtat
ccagaacaagctgtccgtggaccacagcgaccctgtgatcctgaacgtcctttacgggccggacgaccccaccatttccccgtcgtacact
tactaccggccgggcgtgaacctgtccctgtcgtgccacgctgcctccaatccgccggcccagtactcctggctcatcgacggaaacatcc
agcagcacacccaagaactgttcatctccaacattaccgagaaaaactcgggactttacacctgtcaagccaacaattccgccagcggcca
ctcccgcaccactgtcaaaactatcactgtgtccgccgaactcccgaagcccagcatcagctccaacaactcgaagcccgtggaggataa
ggacgctgtcgcgttcacctgtgaaccagaggcacagaataccacctacctttggtgggtcaacggacagtccctgcctgtctcaccgaga
ctgcagctgtcaaacgggaataggactctgaccttgtttaacgtcacccggaacgacgcccgggcctacgtgtgcggcatccagaactcc
gtgagcgcaaaccggtctgacccagtgaccctggatgtgctgtacggccccgacactccgatcatttcaccccccgattcatcctacctgtc
cggcgctaacctcaacctctcatgccactccgcatccaaccccagcccgcaatattcgtggcgcattaacggaattcctcagcaacataccc
aggtcctgttcattgcgaagatcacccctaacaacaacggaacctacgcctgctttgtgtcaaacctggccactggtagaaacaactccatc
gtgaagtccattaccgtgtcggcgtcc.
Plasmid 1431 Polypeptide

SEQ ID NO: 37

MASTPGTQSPFFLLLLLTVLTVVTGSGHASSTPGGEKETSATQRSSVPSSTEKNAVSMTS
SVLSSHSPGSGSSTTQGQDVTLAPATEPASGSAATWGQDVTSVPVTRPALGSTTPPAHD
VTSAPDNKPAPGSTAPPAHGVTSAPDTRPAPGSTAPPAHGVTSAPDTRPAPGSTAPPAHG
VTSAPDTRPAPGSTAPPAHGVTSAPDTRPAPGSTAPPAHGVTSAPDTRPALGSTAPPVHN
VTSASGSASGSASTLVHNGTSARATTTPASKSTPFSIPSHHSDTPTTLASHSTKTDASSTH
HSSVPPLTSSNHSTSPQLSTGVSFFFLSFHISNLQFNSSLEDPSTDYYQELQRDISEMFLQI
YKQGGFLGLSNIKFRPGSVVVQLTLAFREGTINVHDVETQFNQYKTEAASRYNLTISDV
SVSDVPFPFSAQSGAGVPGWGIALLVLVCVLVALAIVYLIALAVCQCRRKNYGQLDIFP
ARDTYHPMSEYPTYHTHGRYVPPSSTDRSPYEKVSAGNGGSSLSYTNPAVAAASANLG
SGRIFNAHYAGYFADLLIHDIETNPGPKLTIESTPFNVAEGKEVLLLVHNLPQHLFGYSW
YKGERVDGNRQIIGYVIGTQQATPGPAYSGREIIYPNASLLIQNIIQNDTGFYTLHVIKSDL
VNEEATGQFRVYPELPKPFITSNNSNPVEDEDAVALTCEPEIQNTTYLWWVNNQSLPVS
PRLQLSNDNRTLTLLSVTRNDVGPYECGIQNKLSVDHSDPVILNVLYGPDDPTISPSYTY
YRPGVNLSLSCHAASNPPAQYSWLIDGNIQQHTQELFISNITEKNSGLYTCQANNSASGH
SRTTVKTITVSAELPKPSISSNNSKPVEDKDAVAFTCEPEAQNTTYLWWVNGQSLPVSPR
LQLSNGNRTLTLFNVTRNDARAYVCGIQNSVSANRSDPVTLDVLYGPDTPIISPPDSSYL
SGANLNLSCHSASNPSPQYSWRINGIPQQHTQVLFIAKITPNNNGTYACFVSNLATGRNN
SIVKSITVSAS.
Plasmid 1432 ORF (nucleotide sequence)

SEQ ID NO: 38

atggctagcaagctgaccattgagagcactcccttcaacgtggctgaggggaaggaggtgctgctcctggtgcacaatctgccccagcac
ctgttcgggtactcctggtacaagggagaacgcgtggacgggaaccggcagatcataggctacgtcatcggaacccagcaggccacac
ccggtccagcgtacagcggccgggagattatctacccgaacgcctccctgctgatccaaaacatcatccagaacgacaccggtttctacac
tctgcacgtgattaagtcagatctggtcaacgaagaggccaccggccaattcagggtgtaccccgaactccctaagccgttcatcacctcga
acaacagcaacccggtcgaggatgaagatgcggtggccttgacgtgcgaacctgagatccagaacaccacctacttgtggtgggtgaac
aatcagagcctgccagtctccccacgactccagctgtcgaacgacaacaggaccctgactttgctgtccgtgactcggaacgacgtgggc
ccttatgaatgcggtatccagaacaagctgtccgtggaccacagcgaccctgtgatcctgaacgtcctttacgggccggacgaccccacca
tttccccgtcgtacacttactaccggccgggcgtgaacctgtccctgtcgtgccacgctgcctccaatccgccggcccagtactcctggctc
atcgacggaaacatccagcagcacacccaagaactgttcatctccaacattaccgagaaaaactcgggactttacacctgtcaagccaaca
attccgccagcggccactcccgcaccactgtcaaaactatcactgtgtccgccgaactcccgaagcccagcatcagctccaacaactcga
agcccgtggaggataaggacgctgtcgcgttcacctgtgaaccagaggcacagaataccacctacctttggtgggtcaacggacagtccc
tgcctgtctcaccgagactgcagctgtcaaacgggaataggactctgaccttgtttaacgtcacccggaacgacgcccgggcctacgtgtg
cggcatccagaactccgtgagcgcaaaccggtctgacccagtgaccctggatgtgctgtacggccccgacactccgatcatttcaccccc
cgattcatcctacctgtccggcgctaacctcaacctctcatgccactccgcatccaaccccagcccgcaatattcgtggcgcattaacggaat
tcctcagcaacatacccaggtcctgttcattgcgaagatcacccctaacaacaacggaacctacgcctgctttgtgtcaaacctggccactg
gtagaaacaactccatcgtgaagtccattaccgtgtcggcgtccggatccggcgagggcagaggcagcctgctgacatgtggcgacgtg
gaagagaaccctggccccggagctgccccggagccggagaggacccccgttggccagggatcgtgggcccatccgggacgcaccag
gggaccatccgacaggggattctgtgtggtgtcaccggccaggccagcagaagaggcaaccagcctcgagggagcgttgtctggaacc
agacattcccacccgtcggtgggccggcagcaccacgcgggaccaccgtccacttccagaccgccacggccatgggacaccccttgcc
cgcctgtgtatgccgagactaaacacttcctgtactcatccggagacaaggaacagcttcggccgtccttcctcctgtcgtcgctcagaccg
agcctgaccggagcacgcagattggtggaaactatcttccttgggtcacgtccgtggatgccaggtaccccacggcgcctcccgcgcctc
ccacagagatactggcagatgcggcctctgttcctggaattgctgggaaaccacgctcagtgcccgtacggagtcctgctcaagactcact
gccctctgagggcggcggtcactccggcggccggagtgtgcgcacgggagaagccccagggaagcgtggcagctccggaagagga
ggacaccgatccgcgccgcctcgtgcaacttctgcgccagcactcctcgccctggcaagtctacgggttcgtccgcgcctgcctgcgccg
cctggtgccgcctgggctctggggttcccggcataacgagcgccgcttcctgagaaatactaagaagtttatctcacttggaaaacatgcca
agttgtcgctgcaagaactcacgtggaagatgtcagtccgcgattgcgcctggctgcgccgctcgccgggcgtcgggtgtgttccagctgc
agaacaccgcctgagagaagaaattctggccaaatttctgcattggctgatgtcagtgtacgtggtcgagctgctgcgctcctttttctacgtc
actgagactacctttcaaaagaaccgcctgttcttctaccgcaaatctgtgtggagcaagctgcagtcaatcggcattcgccagcatctgaag
agggtgcagctgcgggaactttccgaggcagaagtccgccagcaccgggaggcccggccggcgcttctcacgtcgcgtctgagattcat
cccaaagcccgacgggctgaggcctatcgtcaacatggattacgtcgtgggcgctcgcacctttcgccgtgaaaagcgggccgaacgctt
gacctcacgggtgaaggccctcttctccgtgctgaactacgagagagcaagacggcctggcctgctgggagcttcggtgctgggactgg
acgatatccaccgggcttggcggacctttgttctccgggtgagagcccaagaccctccgccggaactgtacttcgtgaaggtggcgatcac
cggagcctatgatactattccgcaagatcgactcaccgaagtcatcgcctcgatcatcaaaccgcagaacacttactgcgtcaggcggtac
gccgtggtccagaaggccgcgcatggccacgtgagaaaggcgttcaagtcgcacgtgtccactctcaccgacctccagccttacatgag
gcaattcgttgcgcatttgcaagagacttcgcccctgagagatgcggtggtcatcgagcagagctccagcctgaacgaagcgagcagcg
gtctgtttgacgtgttcctccgcttcatgtgtcatcacgcggtgcgaatcaggggaaaatcatacgtgcagtgccagggaatcccacaaggc
agcattctgtcgactctcttgtgttccctttgctacggcgatatggaaaacaagctgttcgctgggatcagacgggacgggttgctgctcaga
ctggtggacgacttcctgctggtgactccgcacctcactcacgccaaaacctttctccgcactctggtgaggggagtgccagaatacggct
gtgtggtcaatctccggaaaactgtggtgaatttccctgtcgaggatgaggcactcggaggaaccgcatttgtccaaatgccagcacatggc
ctgttcccatggtgcggtctgctgctggacacccgaactcttgaagtgcagtccgactactccagctatgcccggacgagcatccgcgcca
gcctcactttcaatcgcggctttaaggccggacgaaacatgcgcagaaagcttttcggagtcctccggcttaaatgccattcgctctttctcga
tctccaagtcaattcgctgcagaccgtgtgcacgaacatctacaagatcctgctgctccaagcctaccggttccacgcttgcgtgcttcagct
gccgtttcaccaacaggtgtggaagaacccgaccttctttctgcgggtcattagcgatactgcctccctgtgttactcaatcctcaaggcaaa
gaacgccggaatgtcgctgggtgcgaaaggagccgcgggacctcttcctagcgaagcggtgcagtggctctgccaccaggctttcctcct
gaagctgaccaggcacagagtgacctacgtcccgctgctgggctcgctgcgcactgcacagacccagctgtctagaaaactccccggca
ccaccctgaccgctctggaagccgccgccaacccagcattgccgtcagatttcaagaccatcttggac.
Plasmid 1432 Polypeptide

SEQ ID NO: 39

MASKLTIESTPFNVAEGKEVLLLVHNLPQHLFGYSWYKGERVDGNRQIIGYVIGTQQAT
PGPAYSGREIIYPNASLLIQNIIQNDTGFYTLHVIKSDLVNEEATGQFRVYPELPKPFITSN
NSNPVEDEDAVALTCEPEIQNTTYLWWVNNQSLPVSPRLQLSNDNRTLTLLSVTRNDV
GPYECGIQNKLSVDHSDPVILNVLYGPDDPTISPSYTYYRPGVNLSLSCHAASNPPAQYS
WLIDGNIQQHTQELFISNITEKNSGLYTCQANNSASGHSRTTVKTITVSAELPKPSISSNNS
KPVEDKDAVAFTCEPEAQNTTYLWWVNGQSLPVSPRLQLSNGNRTLTLFNVTRNDAR
AYVCGIQNSVSANRSDPVTLDVLYGPDTPIISPPDSSYLSGANLNLSCHSASNPSPQYSW
RINGIPQQHTQVLFIAKITPNNNGTYACFVSNLATGRNNSIVKSITVSASGSGEGRGSLLT
CGDVEENPGPGAAPEPERTPVGQGSWAHPGRTRGPSDRGFCVVSPARPAEEATSLEGAL
SGTRHSHPSVGRQHHAGPPSTSRPPRPWDTPCPPVYAETKHFLYSSGDKEQLRPSFLLSS
LRPSLTGARRLVETIFLGSRPWMPGTPRRLPRLPQRYWQMRPLFLELLGNHAQCPYGVL
LKTHCPLRAAVTPAAGVCAREKPQGSVAAPEEEDTDPRRLVQLLRQHSSPWQVYGFVR
ACLRRLVPPGLWGSRHNERRFLRNTKKFISLGKHAKLSLQELTWKMSVRDCAWLRRSP
GVGCVPAAEHRLREEILAKFLHWLMSVYVVELLRSFFYVTETTFQKNRLFFYRKSVWS
KLQSIGIRQHLKRVQLRELSEAEVRQHREARPALLTSRLRFIPKPDGLRPIVNMDYVVGA
RTFRREKRAERLTSRVKALFSVLNYERARRPGLLGASVLGLDDIHRAWRTFVLRVRAQ
DPPPELYFVKVAITGAYDTIPQDRLTEVIASIIKPQNTYCVRRYAVVQKAAHGHVRKAF
KSHVSTLTDLQPYMRQFVAHLQETSPLRDAVVIEQSSSLNEASSGLFDVFLRFMCHHAV
RIRGKSYVQCQGIPQGSILSTLLCSLCYGDMENKLFAGIRRDGLLLRLVDDFLLVTPHLT
HAKTFLRTLVRGVPEYGCVVNLRKTVVNFPVEDEALGGTAFVQMPAHGLFPWCGLLL
DTRTLEVQSDYSSYARTSIRASLTFNRGFKAGRNMRRKLFGVLRLKCHSLFLDLQVNSL
QTVCTNIYKILLLQAYRFHACVLQLPFHQQVWKNPTFFLRVISDTASLCYSILKAKNAG
MSLGAKGAAGPLPSEAVQWLCHQAFLLKLTRHRVTYVPLLGSLRTAQTQLSRKLPGTT
LTALEAAANPALPSDFKTILD.
Plasmid 1424 ORF (nucleotide sequence)

SEQ ID NO: 42

atggctagcacccctggaacccagagccccttcttccttctgctgctgctgaccgtgctgactgtcgtgacaggctctggccacgccagctc
tacacctggcggcgagaaagagacaagcgccacccagagaagcagcgtgccaagcagcaccgagaagaacgccgtgtccatgacca
gctccgtgctgagcagccactctcctggcagcggcagcagcacaacacagggccaggatgtgacactggcccctgccacagaacctgc
ctctggatctgccgccacctggggacaggacgtgacaagcgtgccagtgaccagacctgccctgggctctacaacaccccctgcccacg
atgtgaccagcgcccctgataacaagcctgcccctggaagcacagcccctccagctcatggcgtgacctctgccccagataccagacca
gccccaggatctacagccccacccgcacacggcgtgacaagtgcccctgacacaagacccgctccaggctctactgctcctcctgcccat
ggcgtgacaagcgctcccgatacaaggccagctcctggctccacagcaccaccagcacatggcgtgacatcagctcccgacactagacc
tgctcccggatcaaccgctccaccagctcacggcgtgaccagcgcacctgataccagacctgctctgggaagcaccgcccctcccgtgc
acaatgtgacatctgcttccggcagcgccagcggctctgcctctacactggtgcacaacggcaccagcgccagagccacaacaacccca
gccagcaagagcacccccttcagcatccctagccaccacagcgacacccctaccacactggccagccactccaccaagaccgatgcctc
tagcacccaccactccagcgtgccccctctgaccagcagcaaccacagcacaagcccccagctgtctaccggcgtctcattcttctttctgt
ccttccacatcagcaacctgcagttcaacagcagcctggaagatcccagcaccgactactaccaggaactgcagcgggatatcagcgag
atgttcctgcaaatctacaagcagggcggcttcctgggcctgagcaacatcaagttcagacccggcagcgtggtggtgcagctgaccctg
gctttccgggaaggcaccatcaacgtgcacgacgtggaaacccagttcaaccagtacaagaccgaggccgccagccggtacaacctga
ccatctccgatgtgtccgtgtccgacgtgcccttcccattctctgcccagtctggcgcaggcgtgccaggatggggaattgctctgctggtgc
tcgtgtgcgtgctggtggccctggccatcgtgtatctgattgccctggccgtgtgccagtgccggcggaagaattacggccagctggacat
cttccccgccagagacacctaccaccccatgagcgagtaccccacataccacacccacggcagatacgtgccacccagctccaccgaca
gatccccctacgagaaagtgtctgccggcaacggcggcagctccctgagctacacaaatcctgccgtggccgctgcctccgccaacctg
ggatccggcacaatcctgtctgagggcgccaccaacttcagcctgctgaaactggccggcgacgtggaactgaaccctggccctggagc
tgccccggagccggagaggacccccgttggccagggatcgtgggcccatccgggacgcaccaggggaccatccgacaggggattctg
tgtggtgtcaccggccaggccagcagaagaggcaaccagcctcgagggagcgttgtctggaaccagacattcccacccgtcggtgggc
cggcagcaccacgcgggaccaccgtccacttccagaccgccacggccatgggacaccccttgcccgcctgtgtatgccgagactaaac
acttcctgtactcatccggagacaaggaacagcttcggccgtccttcctcctgtcgtcgctcagaccgagcctgaccggagcacgcagatt
ggtggaaactatcttccttgggtcacgtccgtggatgccaggtaccccacggcgcctcccgcgcctcccacagagatactggcagatgcg
gcctctgttcctggaattgctgggaaaccacgctcagtgcccgtacggagtcctgctcaagactcactgccctctgagggcggcggtcact
ccggcggccggagtgtgcgcacgggagaagccccagggaagcgtggcagctccggaagaggaggacaccgatccgcgccgcctcg
tgcaacttctgcgccagcactcctcgccctggcaagtctacgggttcgtccgcgcctgcctgcgccgcctggtgccgcctgggctctgggg
ttcccggcataacgagcgccgcttcctgagaaatactaagaagtttatctcacttggaaaacatgccaagttgtcgctgcaagaactcacgtg
gaagatgtcagtccgcgattgcgcctggctgcgccgctcgccgggcgtcgggtgtgttccagctgcagaacaccgcctgagagaagaaa
ttctggccaaatttctgcattggctgatgtcagtgtacgtggtcgagctgctgcgctcctttttctacgtcactgagactacctttcaaaagaacc
gcctgttcttctaccgcaaatctgtgtggagcaagctgcagtcaatcggcattcgccagcatctgaagagggtgcagctgcgggaactttcc
gaggcagaagtccgccagcaccgggaggcccggccggcgcttctcacgtcgcgtctgagattcatcccaaagcccgacgggctgagg
cctatcgtcaacatggattacgtcgtgggcgctcgcacctttcgccgtgaaaagcgggccgaacgcttgacctcacgggtgaaggccctct
tctccgtgctgaactacgagagagcaagacggcctggcctgctgggagcttcggtgctgggactggacgatatccaccgggcttggcgg
acctttgttctccgggtgagagcccaagaccctccgccggaactgtacttcgtgaaggtggcgatcaccggagcctatgatactattccgca
agatcgactcaccgaagtcatcgcctcgatcatcaaaccgcagaacacttactgcgtcaggcggtacgccgtggtccagaaggccgcgc
atggccacgtgagaaaggcgttcaagtcgcacgtgtccactctcaccgacctccagccttacatgaggcaattcgttgcgcatttgcaagag
acttcgcccctgagagatgcggtggtcatcgagcagagctccagcctgaacgaagcgagcagcggtctgtttgacgtgttcctccgcttcat
gtgtcatcacgcggtgcgaatcaggggaaaatcatacgtgcagtgccagggaatcccacaaggcagcattctgtcgactctcttgtgttccc
tttgctacggcgatatggaaaacaagctgttcgctgggatcagacgggacgggttgctgctcagactggtggacgacttcctgctggtgact
ccgcacctcactcacgccaaaacctttctccgcactctggtgaggggagtgccagaatacggctgtgtggtcaatctccggaaaactgtggt
gaatttccctgtcgaggatgaggcactcggaggaaccgcatttgtccaaatgccagcacatggcctgttcccatggtgcggtctgctgctgg
acacccgaactcttgaagtgcagtccgactactccagctatgcccggacgagcatccgcgccagcctcactttcaatcgcggctttaaggc
cggacgaaacatgcgcagaaagcttttcggagtcctccggcttaaatgccattcgctctttctcgatctccaagtcaattcgctgcagaccgt
gtgcacgaacatctacaagatcctgctgctccaagcctaccggttccacgcttgcgtgcttcagctgccgtttcaccaacaggtgtggaaga
acccgaccttctttctgcgggtcattagcgatactgcctccctgtgttactcaatcctcaaggcaaagaacgccggaatgtcgctgggtgcga
aaggagccgcgggacctcttcctagcgaagcggtgcagtggctctgccaccaggctttcctcctgaagctgaccaggcacagagtgacct
acgtcccgctgctgggctcgctgcgcactgcacagacccagctgtctagaaaactccccggcaccaccctgaccgctctggaagccgcc
gccaacccagcattgccgtcagatttcaagaccatcttggacggatccggccagtgcaccaattacgccctgctgaagctggccggcgac
gtggaatctaaccctggccctgaatcgccaagcgcaccccctcatcggtggtgcatcccttggcaacgcctcctcctgaccgcctcactgct
gactttctggaacccgccgaccaccgcaaagctgaccattgagagcactcccttcaacgtggctgaggggaaggaggtgctgctcctggt
gcacaatctgccccagcacctgttcgggtactcctggtacaagggagaacgcgtggacgggaaccggcagatcataggctacgtcatcg
gaacccagcaggccacacccggtccagcgtacagcggccgggagattatctacccgaacgcctccctgctgatccaaaacatcatccag
aacgacaccggtttctacactctgcacgtgattaagtcagatctggtcaacgaagaggccaccggccaattcagggtgtaccccgaactcc
ctaagccgttcatcacctcgaacaacagcaacccggtcgaggatgaagatgcggtggccttgacgtgcgaacctgagatccagaacacc
acctacttgtggtgggtgaacaatcagagcctgccagtctccccacgactccagctgtcgaacgacaacaggaccctgactttgctgtccgt
gactcggaacgacgtgggcccttatgaatgcggtatccagaacaagctgtccgtggaccacagcgaccctgtgatcctgaacgtcctttac
gggccggacgaccccaccatttccccgtcgtacacttactaccggccgggcgtgaacctgtccctgtcgtgccacgctgcctccaatccgc
cggcccagtactcctggctcatcgacggaaacatccagcagcacacccaagaactgttcatctccaacattaccgagaaaaactcgggact
ttacacctgtcaagccaacaattccgccagcggccactcccgcaccactgtcaaaactatcactgtgtccgccgaactcccgaagcccagc
atcagctccaacaactcgaagcccgtggaggataaggacgctgtcgcgttcacctgtgaaccagaggcacagaataccacctacctttggt
gggtcaacggacagtccctgcctgtctcaccgagactgcagctgtcaaacgggaataggactctgaccttgtttaacgtcacccggaacga
cgcccgggcctacgtgtgcggcatccagaactccgtgagcgcaaaccggtctgacccagtgaccctggatgtgctgtacggccccgaca
ctccgatcatttcaccccccgattcatcctacctgtccggcgctaacctcaacctctcatgccactccgcatccaaccccagcccgcaatattc
gtggcgcattaacggaattcctcagcaacatacccaggtcctgttcattgcgaagatcacccctaacaacaacggaacctacgcctgctttgt
gtcaaacctggccactggtagaaacaactccatcgtgaagtccattaccgtgtcggcgtccggaacttccccgggcctgagcgccggcgc
caccgtgggaattatgatcggcgtgctcgtgggagtggccctgatc.
Plasmid 1424 Polypeptide

SEQ ID NO: 43

MASTPGTQSPFFLLLLLTVLTVVTGSGHASSTPGGEKETSATQRSSVPSSTEKNAVSMTS
SVLSSHSPGSGSSTTQGQDVTLAPATEPASGSAATWGQDVTSVPVTRPALGSTTPPAHD
VTSAPDNKPAPGSTAPPAHGVTSAPDTRPAPGSTAPPAHGVTSAPDTRPAPGSTAPPAHG
VTSAPDTRPAPGSTAPPAHGVTSAPDTRPAPGSTAPPAHGVTSAPDTRPALGSTAPPVHN
VTSASGSASGSASTLVHNGTSARATTTPASKSTPFSIPSHHSDTPTTLASHSTKTDASSTH
HSSVPPLTSSNHSTSPQLSTGVSFFFLSFHISNLQFNSSLEDPSTDYYQELQRDISEMFLQI
YKQGGFLGLSNIKFRPGSVVVQLTLAFREGTINVHDVETQFNQYKTEAASRYNLTISDV
SVSDVPFPFSAQSGAGVPGWGIALLVLVCVLVALAIVYLIALAVCQCRRKNYGQLDIFP
ARDTYHPMSEYPTYHTHGRYVPPSSTDRSPYEKVSAGNGGSSLSYTNPAVAAASANLG
SGTILSEGATNFSLLKLAGDVELNPGPGAAPEPERTPVGQGSWAHPGRTRGPSDRGFCV
VSPARPAEEATSLEGALSGTRHSHPSVGRQHHAGPPSTSRPPRPWDTPCPPVYAETKHFL
YSSGDKEQLRPSFLLSSLRPSLTGARRLVETIFLGSRPWMPGTPRRLPRLPQRYWQMRPL
FLELLGNHAQCPYGVLLKTHCPLRAAVTPAAGVCAREKPQGSVAAPEEEDTDPRRLVQ
LLRQHSSPWQVYGFVRACLRRLVPPGLWGSRHNERRFLRNTKKFISLGKHAKLSLQELT
WKMSVRDCAWLRRSPGVGCVPAAEHRLREEILAKFLHWLMSVYVVELLRSFFYVTET
TFQKNRLFFYRKSVWSKLQSIGIRQHLKRVQLRELSEAEVRQHREARPALLTSRLRFIPK
PDGLRPIVNMDYVVGARTFRREKRAERLTSRVKALFSVLNYERARRPGLLGASVLGLD
DIHRAWRTFVLRVRAQDPPPELYFVKVAITGAYDTIPQDRLTEVIASIIKPQNTYCVRRY
AVVQKAAHGHVRKAFKSHVSTLTDLQPYMRQFVAHLQETSPLRDAVVIEQSSSLNEAS
SGLFDVFLRFMCHHAVRIRGKSYVQCQGIPQGSILSTLLCSLCYGDMENKLFAGIRRDGL
LLRLVDDFLLVTPHLTHAKTFLRTLVRGVPEYGCVVNLRKTVVNFPVEDEALGGTAFV
QMPAHGLFPWCGLLLDTRTLEVQSDYSSYARTSIRASLTFNRGFKAGRNMRRKLFGVL
RLKCHSLFLDLQVNSLQTVCTNIYKILLLQAYRFHACVLQLPFHQQVWKNPTFFLRVISD
TASLCYSILKAKNAGMSLGAKGAAGPLPSEAVQWLCHQAFLLKLTRHRVTYVPLLGSL
RTAQTQLSRKLPGTTLTALEAAANPALPSDFKTILDGSGQCTNYALLKLAGDVESNPGP
ESPSAPPHRWCIPWQRLLLTASLLTFWNPPTTAKLTIESTPFNVAEGKEVLLLVHNLPQH
LFGYSWYKGERVDGNRQIIGYVIGTQQATPGPAYSGREIIYPNASLLIQNIIQNDTGFYTL
HVIKSDLVNEEATGQFRVYPELPKPFITSNNSNPVEDEDAVALTCEPEIQNTTYLWWVN
NQSLPVSPRLQLSNDNRTLTLLSVTRNDVGPYECGIQNKLSVDHSDPVILNVLYGPDDPT
ISPSYTYYRPGVNLSLSCHAASNPPAQYSWLIDGNIQQHTQELFISNITEKNSGLYTCQAN
NSASGHSRTTVKTITVSAELPKPSISSNNSKPVEDKDAVAFTCEPEAQNTTYLWWVNGQ
SLPVSPRLQLSNGNRTLTLFNVTRNDARAYVCGIQNSVSANRSDPVTLDVLYGPDTPIIS
PPDSSYLSGANLNLSCHSASNPSPQYSWRINGIPQQHTQVLFIAKITPNNNGTYACFVSNL
ATGRNNSIVKSITVSASGTSPGLSAGATVGIMIGVLVGVALI.
Plasmid 1425 ORF (nucleotide sequence)

SEQ ID NO: 44

atggctagcgaatcgccaagcgcaccccctcatcggtggtgcatcccttggcaacgcctcctcctgaccgcctcactgctgactttctggaa
cccgccgaccaccgcaaagctgaccattgagagcactcccttcaacgtggctgaggggaaggaggtgctgctcctggtgcacaatctgc
cccagcacctgttcgggtactcctggtacaagggagaacgcgtggacgggaaccggcagatcataggctacgtcatcggaacccagca
ggccacacccggtccagcgtacagcggccgggagattatctacccgaacgcctccctgctgatccaaaacatcatccagaacgacaccg
gtttctacactctgcacgtgattaagtcagatctggtcaacgaagaggccaccggccaattcagggtgtaccccgaactccctaagccgttc
atcacctcgaacaacagcaacccggtcgaggatgaagatgcggtggccttgacgtgcgaacctgagatccagaacaccacctacttgtgg
tgggtgaacaatcagagcctgccagtctccccacgactccagctgtcgaacgacaacaggaccctgactttgctgtccgtgactcggaacg
acgtgggcccttatgaatgcggtatccagaacaagctgtccgtggaccacagcgaccctgtgatcctgaacgtcctttacgggccggacga
ccccaccatttccccgtcgtacacttactaccggccgggcgtgaacctgtccctgtcgtgccacgctgcctccaatccgccggcccagtact
cctggctcatcgacggaaacatccagcagcacacccaagaactgttcatctccaacattaccgagaaaaactcgggactttacacctgtcaa
gccaacaattccgccagcggccactcccgcaccactgtcaaaactatcactgtgtccgccgaactcccgaagcccagcatcagctccaac
aactcgaagcccgtggaggataaggacgctgtcgcgttcacctgtgaaccagaggcacagaataccacctacctttggtgggtcaacgga
cagtccctgcctgtctcaccgagactgcagctgtcaaacgggaataggactctgaccttgtttaacgtcacccggaacgacgcccgggcct
acgtgtgcggcatccagaactccgtgagcgcaaaccggtctgacccagtgaccctggatgtgctgtacggccccgacactccgatcatttc
accccccgattcatcctacctgtccggcgctaacctcaacctctcatgccactccgcatccaaccccagcccgcaatattcgtggcgcattaa
cggaattcctcagcaacatacccaggtcctgttcattgcgaagatcacccctaacaacaacggaacctacgcctgctttgtgtcaaacctgg
ccactggtagaaacaactccatcgtgaagtccattaccgtgtcggcgtccggaacttccccgggcctgagcgccggcgccaccgtggga
attatgatcggcgtgctcgtgggagtggccctgatcggatccggcgagggcagaggcagcctgctgacatgtggcgacgtggaagagaa
ccctggccccacccctggaacccagagccccttcttccttctgctgctgctgaccgtgctgactgtcgtgacaggctctggccacgccagct
ctacacctggcggcgagaaagagacaagcgccacccagagaagcagcgtgccaagcagcaccgagaagaacgccgtgtccatgacc
agctccgtgctgagcagccactctcctggcagcggcagcagcacaacacagggccaggatgtgacactggcccctgccacagaacctg
cctctggatctgccgccacctggggacaggacgtgacaagcgtgccagtgaccagacctgccctgggctctacaacaccccctgcccac
gatgtgaccagcgcccctgataacaagcctgcccctggaagcacagcccctccagctcatggcgtgacctctgccccagataccagacc
agccccaggatctacagccccacccgcacacggcgtgacaagtgcccctgacacaagacccgctccaggctctactgctcctcctgccc
atggcgtgacaagcgctcccgatacaaggccagctcctggctccacagcaccaccagcacatggcgtgacatcagctcccgacactaga
cctgctcccggatcaaccgctccaccagctcacggcgtgaccagcgcacctgataccagacctgctctgggaagcaccgcccctcccgt
gcacaatgtgacatctgcttccggcagcgccagcggctctgcctctacactggtgcacaacggcaccagcgccagagccacaacaaccc
cagccagcaagagcacccccttcagcatccctagccaccacagcgacacccctaccacactggccagccactccaccaagaccgatgc
ctctagcacccaccactccagcgtgccccctctgaccagcagcaaccacagcacaagcccccagctgtctaccggcgtctcattcttctttc
tgtccttccacatcagcaacctgcagttcaacagcagcctggaagatcccagcaccgactactaccaggaactgcagcgggatatcagcg
agatgttcctgcaaatctacaagcagggcggcttcctgggcctgagcaacatcaagttcagacccggcagcgtggtggtgcagctgaccc
tggctttccgggaaggcaccatcaacgtgcacgacgtggaaacccagttcaaccagtacaagaccgaggccgccagccggtacaacctg
accatctccgatgtgtccgtgtccgacgtgcccttcccattctctgcccagtctggcgcaggcgtgccaggatggggaattgctctgctggtg
ctcgtgtgcgtgctggtggccctggccatcgtgtatctgattgccctggccgtgtgccagtgccggcggaagaattacggccagctggaca
tcttccccgccagagacacctaccaccccatgagcgagtaccccacataccacacccacggcagatacgtgccacccagctccaccgac
agatccccctacgagaaagtgtctgccggcaacggcggcagctccctgagctacacaaatcctgccgtggccgctgcctccgccaacct
gggatccggcacaatcctgtctgagggcgccaccaacttcagcctgctgaaactggccggcgacgtggaactgaaccctggccctggag
ctgccccggagccggagaggacccccgttggccagggatcgtgggcccatccgggacgcaccaggggaccatccgacaggggattct
gtgtggtgtcaccggccaggccagcagaagaggcaaccagcctcgagggagcgttgtctggaaccagacattcccacccgtcggtggg
ccggcagcaccacgcgggaccaccgtccacttccagaccgccacggccatgggacaccccttgcccgcctgtgtatgccgagactaaa
cacttcctgtactcatccggagacaaggaacagcttcggccgtccttcctcctgtcgtcgctcagaccgagcctgaccggagcacgcagat
tggtggaaactatcttccttgggtcacgtccgtggatgccaggtaccccacggcgcctcccgcgcctcccacagagatactggcagatgcg
gcctctgttcctggaattgctgggaaaccacgctcagtgcccgtacggagtcctgctcaagactcactgccctctgagggcggcggtcact
ccggcggccggagtgtgcgcacgggagaagccccagggaagcgtggcagctccggaagaggaggacaccgatccgcgccgcctcg
tgcaacttctgcgccagcactcctcgccctggcaagtctacgggttcgtccgcgcctgcctgcgccgcctggtgccgcctgggctctgggg
ttcccggcataacgagcgccgcttcctgagaaatactaagaagtttatctcacttggaaaacatgccaagttgtcgctgcaagaactcacgtg
gaagatgtcagtccgcgattgcgcctggctgcgccgctcgccgggcgtcgggtgtgttccagctgcagaacaccgcctgagagaagaaa
ttctggccaaatttctgcattggctgatgtcagtgtacgtggtcgagctgctgcgctcctttttctacgtcactgagactacctttcaaaagaacc
gcctgttcttctaccgcaaatctgtgtggagcaagctgcagtcaatcggcattcgccagcatctgaagagggtgcagctgcgggaactttcc
gaggcagaagtccgccagcaccgggaggcccggccggcgcttctcacgtcgcgtctgagattcatcccaaagcccgacgggctgagg
cctatcgtcaacatggattacgtcgtgggcgctcgcacctttcgccgtgaaaagcgggccgaacgcttgacctcacgggtgaaggccctct
tctccgtgctgaactacgagagagcaagacggcctggcctgctgggagcttcggtgctgggactggacgatatccaccgggcttggcgg
acctttgttctccgggtgagagcccaagaccctccgccggaactgtacttcgtgaaggtggcgatcaccggagcctatgatactattccgca
agatcgactcaccgaagtcatcgcctcgatcatcaaaccgcagaacacttactgcgtcaggcggtacgccgtggtccagaaggccgcgc
atggccacgtgagaaaggcgttcaagtcgcacgtgtccactctcaccgacctccagccttacatgaggcaattcgttgcgcatttgcaagag
acttcgcccctgagagatgcggtggtcatcgagcagagctccagcctgaacgaagcgagcagcggtctgtttgacgtgttcctccgcttcat
gtgtcatcacgcggtgcgaatcaggggaaaatcatacgtgcagtgccagggaatcccacaaggcagcattctgtcgactctcttgtgttccc
tttgctacggcgatatggaaaacaagctgttcgctgggatcagacgggacgggttgctgctcagactggtggacgacttcctgctggtgact
ccgcacctcactcacgccaaaacctttctccgcactctggtgaggggagtgccagaatacggctgtgtggtcaatctccggaaaactgtggt
gaatttccctgtcgaggatgaggcactcggaggaaccgcatttgtccaaatgccagcacatggcctgttcccatggtgcggtctgctgctgg
acacccgaactcttgaagtgcagtccgactactccagctatgcccggacgagcatccgcgccagcctcactttcaatcgcggctttaaggc
cggacgaaacatgcgcagaaagcttttcggagtcctccggcttaaatgccattcgctctttctcgatctccaagtcaattcgctgcagaccgt
gtgcacgaacatctacaagatcctgctgctccaagcctaccggttccacgcttgcgtgcttcagctgccgtttcaccaacaggtgtggaaga
acccgaccttctttctgcgggtcattagcgatactgcctccctgtgttactcaatcctcaaggcaaagaacgccggaatgtcgctgggtgcga
aaggagccgcgggacctcttcctagcgaagcggtgcagtggctctgccaccaggctttcctcctgaagctgaccaggcacagagtgacct
acgtcccgctgctgggctcgctgcgcactgcacagacccagctgtctagaaaactccccggcaccaccctgaccgctctggaagccgcc
gccaacccagcattgccgtcagatttcaagaccatcttggac.
Plasmid 1425 Polypeptide

SEQ ID NO: 45

MASESPSAPPHRWCIPWQRLLLTASLLTFWNPPTTAKLTIESTPFNVAEGKEVLLLVHNL
PQHLFGYSWYKGERVDGNRQIIGYVIGTQQATPGPAYSGREIIYPNASLLIQNIIQNDTGF
YTLHVIKSDLVNEEATGQFRVYPELPKPFITSNNSNPVEDEDAVALTCEPEIQNTTYLWW
VNNQSLPVSPRLQLSNDNRTLTLLSVTRNDVGPYECGIQNKLSVDHSDPVILNVLYGPD
DPTISPSYTYYRPGVNLSLSCHAASNPPAQYSWLIDGNIQQHTQELFISNITEKNSGLYTC
QANNSASGHSRTTVKTITVSAELPKPSISSNNSKPVEDKDAVAFTCEPEAQNTTYLWWV
NGQSLPVSPRLQLSNGNRTLTLFNVTRNDARAYVCGIQNSVSANRSDPVTLDVLYGPDT
PIISPPDSSYLSGANLNLSCHSASNPSPQYSWRINGIPQQHTQVLFIAKITPNNNGTYACFV
SNLATGRNNSIVKSITVSASGTSPGLSAGATVGIMIGVLVGVALIGSGEGRGSLLTCGDV
EENPGPTPGTQSPFFLLLLLTVLTVVTGSGHASSTPGGEKETSATQRSSVPSSTEKNAVS
MTSSVLSSHSPGSGSSTTQGQDVTLAPATEPASGSAATWGQDVTSVPVTRPALGSTTPP
AHDVTSAPDNKPAPGSTAPPAHGVTSAPDTRPAPGSTAPPAHGVTSAPDTRPAPGSTAPP
AHGVTSAPDTRPAPGSTAPPAHGVTSAPDTRPAPGSTAPPAHGVTSAPDTRPALGSTAPP
VHNVTSASGSASGSASTLVHNGTSARATTTPASKSTPFSIPSHHSDTPTTLASHSTKTDAS
STHHSSVPPLTSSNHSTSPQLSTGVSFFFLSFHISNLQFNSSLEDPSTDYYQELQRDISEMF
LQIYKQGGFLGLSNIKFRPGSVVVQLTLAFREGTINVHDVETQFNQYKTEAASRYNLTIS
DVSVSDVPFPFSAQSGAGVPGWGIALLVLVCVLVALAIVYLIALAVCQCRRKNYGQLDI
FPARDTYHPMSEYPTYHTHGRYVPPSSTDRSPYEKVSAGNGGSSLSYTNPAVAAASANL
GSGTILSEGATNFSLLKLAGDVELNPGPGAAPEPERTPVGQGSWAHPGRTRGPSDRGFC
VVSPARPAEEATSLEGALSGTRHSHPSVGRQHHAGPPSTSRPPRPWDTPCPPVYAETKHF
LYSSGDKEQLRPSFLLSSLRPSLTGARRLVETIFLGSRPWMPGTPRRLPRLPQRYWQMRP
LFLELLGNHAQCPYGVLLKTHCPLRAAVTPAAGVCAREKPQGSVAAPEEEDTDPRRLV
QLLRQHSSPWQVYGFVRACLRRLVPPGLWGSRHNERRFLRNTKKFISLGKHAKLSLQE
LTWKMSVRDCAWLRRSPGVGCVPAAEHRLREEILAKFLHWLMSVYVVELLRSFFYVT
ETTFQKNRLFFYRKSVWSKLQSIGIRQHLKRVQLRELSEAEVRQHREARPALLTSRLRFI
PKPDGLRPIVNMDYVVGARTFRREKRAERLTSRVKALFSVLNYERARRPGLLGASVLG
LDDIHRAWRTFVLRVRAQDPPPELYFVKVAITGAYDTIPQDRLTEVIASIIKPQNTYCVR
RYAVVQKAAHGHVRKAFKSHVSTLTDLQPYMRQFVAHLQETSPLRDAVVIEQSSSLNE
ASSGLFDVFLRFMCHHAVRIRGKSYVQCQGIPQGSILSTLLCSLCYGDMENKLFAGIRRD
GLLLRLVDDFLLVTPHLTHAKTFLRTLVRGVPEYGCVVNLRKTVVNFPVEDEALGGTA
FVQMPAHGLFPWCGLLLDTRTLEVQSDYSSYARTSIRASLTFNRGFKAGRNMRRKLFG
VLRLKCHSLFLDLQVNSLQTVCTNIYKILLLQAYRFHACVLQLPFHQQVWKNPTFFLRV
ISDTASLCYSILKAKNAGMSLGAKGAAGPLPSEAVQWLCHQAFLLKLTRHRVTYVPLL
GSLRTAQTQLSRKLPGTTLTALEAAANPALPSDFKTILD.
Plasmid 1426 ORF (nucleotide sequence)

SEQ ID NO: 46

atggctagcggagctgccccggagccggagaggacccccgttggccagggatcgtgggcccatccgggacgcaccaggggaccatc
cgacaggggattctgtgtggtgtcaccggccaggccagcagaagaggcaaccagcctcgagggagcgttgtctggaaccagacattccc
acccgtcggtgggccggcagcaccacgcgggaccaccgtccacttccagaccgccacggccatgggacaccccttgcccgcctgtgta
tgccgagactaaacacttcctgtactcatccggagacaaggaacagcttcggccgtccttcctcctgtcgtcgctcagaccgagcctgaccg
gagcacgcagattggtggaaactatcttccttgggtcacgtccgtggatgccaggtaccccacggcgcctcccgcgcctcccacagagat
actggcagatgcggcctctgttcctggaattgctgggaaaccacgctcagtgcccgtacggagtcctgctcaagactcactgccctctgag
ggcggcggtcactccggcggccggagtgtgcgcacgggagaagccccagggaagcgtggcagctccggaagaggaggacaccgat
ccgcgccgcctcgtgcaacttctgcgccagcactcctcgccctggcaagtctacgggttcgtccgcgcctgcctgcgccgcctggtgccg
cctgggctctggggttcccggcataacgagcgccgcttcctgagaaatactaagaagtttatctcacttggaaaacatgccaagttgtcgctg
caagaactcacgtggaagatgtcagtccgcgattgcgcctggctgcgccgctcgccgggcgtcgggtgtgttccagctgcagaacaccg
cctgagagaagaaattctggccaaatttctgcattggctgatgtcagtgtacgtggtcgagctgctgcgctcctttttctacgtcactgagacta
cctttcaaaagaaccgcctgttcttctaccgcaaatctgtgtggagcaagctgcagtcaatcggcattcgccagcatctgaagagggtgcag
ctgcgggaactttccgaggcagaagtccgccagcaccgggaggcccggccggcgcttctcacgtcgcgtctgagattcatcccaaagcc
cgacgggctgaggcctatcgtcaacatggattacgtcgtgggcgctcgcacctttcgccgtgaaaagcgggccgaacgcttgacctcacg
ggtgaaggccctcttctccgtgctgaactacgagagagcaagacggcctggcctgctgggagcttcggtgctgggactggacgatatcca
ccgggcttggcggacctttgttctccgggtgagagcccaagaccctccgccggaactgtacttcgtgaaggtggcgatcaccggagcctat
gatactattccgcaagatcgactcaccgaagtcatcgcctcgatcatcaaaccgcagaacacttactgcgtcaggcggtacgccgtggtcc
agaaggccgcgcatggccacgtgagaaaggcgttcaagtcgcacgtgtccactctcaccgacctccagccttacatgaggcaattcgttg
cgcatttgcaagagacttcgcccctgagagatgcggtggtcatcgagcagagctccagcctgaacgaagcgagcagcggtctgtttgacg
tgttcctccgcttcatgtgtcatcacgcggtgcgaatcaggggaaaatcatacgtgcagtgccagggaatcccacaaggcagcattctgtcg
actctcttgtgttccctttgctacggcgatatggaaaacaagctgttcgctgggatcagacgggacgggttgctgctcagactggtggacga
cttcctgctggtgactccgcacctcactcacgccaaaacctttctccgcactctggtgaggggagtgccagaatacggctgtgtggtcaatct
ccggaaaactgtggtgaatttccctgtcgaggatgaggcactcggaggaaccgcatttgtccaaatgccagcacatggcctgttcccatggt
gcggtctgctgctggacacccgaactcttgaagtgcagtccgactactccagctatgcccggacgagcatccgcgccagcctcactttcaa
tcgcggctttaaggccggacgaaacatgcgcagaaagcttttcggagtcctccggcttaaatgccattcgctctttctcgatctccaagtcaat
tcgctgcagaccgtgtgcacgaacatctacaagatcctgctgctccaagcctaccggttccacgcttgcgtgcttcagctgccgtttcaccaa
caggtgtggaagaacccgaccttctttctgcgggtcattagcgatactgcctccctgtgttactcaatcctcaaggcaaagaacgccggaat
gtcgctgggtgcgaaaggagccgcgggacctcttcctagcgaagcggtgcagtggctctgccaccaggctttcctcctgaagctgaccag
gcacagagtgacctacgtcccgctgctgggctcgctgcgcactgcacagacccagctgtctagaaaactccccggcaccaccctgaccg
ctctggaagccgccgccaacccagcattgccgtcagatttcaagaccatcttggacggatccggcacaatcctgtctgagggcgccacca
acttcagcctgctgaaactggccggcgacgtggaactgaaccctggccctacccctggaacccagagccccttcttccttctgctgctgctg
accgtgctgactgtcgtgacaggctctggccacgccagctctacacctggcggcgagaaagagacaagcgccacccagagaagcagc
gtgccaagcagcaccgagaagaacgccgtgtccatgaccagctccgtgctgagcagccactctcctggcagcggcagcagcacaacac
agggccaggatgtgacactggcccctgccacagaacctgcctctggatctgccgccacctggggacaggacgtgacaagcgtgccagt
gaccagacctgccctgggctctacaacaccccctgcccacgatgtgaccagcgcccctgataacaagcctgcccctggaagcacagccc
ctccagctcatggcgtgacctctgccccagataccagaccagccccaggatctacagccccacccgcacacggcgtgacaagtgcccct
gacacaagacccgctccaggctctactgctcctcctgcccatggcgtgacaagcgctcccgatacaaggccagctcctggctccacagca
ccaccagcacatggcgtgacatcagctcccgacactagacctgctcccggatcaaccgctccaccagctcacggcgtgaccagcgcacc
tgataccagacctgctctgggaagcaccgcccctcccgtgcacaatgtgacatctgcttccggcagcgccagcggctctgcctctacactg
gtgcacaacggcaccagcgccagagccacaacaaccccagccagcaagagcacccccttcagcatccctagccaccacagcgacacc
cctaccacactggccagccactccaccaagaccgatgcctctagcacccaccactccagcgtgccccctctgaccagcagcaaccacag
cacaagcccccagctgtctaccggcgtctcattcttctttctgtccttccacatcagcaacctgcagttcaacagcagcctggaagatcccag
caccgactactaccaggaactgcagcgggatatcagcgagatgttcctgcaaatctacaagcagggcggcttcctgggcctgagcaacat
caagttcagacccggcagcgtggtggtgcagctgaccctggctttccgggaaggcaccatcaacgtgcacgacgtggaaacccagttca
accagtacaagaccgaggccgccagccggtacaacctgaccatctccgatgtgtccgtgtccgacgtgcccttcccattctctgcccagtct
ggcgcaggcgtgccaggatggggaattgctctgctggtgctcgtgtgcgtgctggtggccctggccatcgtgtatctgattgccctggccgt
gtgccagtgccggcggaagaattacggccagctggacatcttccccgccagagacacctaccaccccatgagcgagtaccccacatacc
acacccacggcagatacgtgccacccagctccaccgacagatccccctacgagaaagtgtctgccggcaacggcggcagctccctgag
ctacacaaatcctgccgtggccgctgcctccgccaacctgggatccggcagaatcttcaacgcccactacgccggctacttcgccgacctg
ctgatccacgacatcgagacaaaccctggccccgaatcgccaagcgcaccccctcatcggtggtgcatcccttggcaacgcctcctcctg
accgcctcactgctgactttctggaacccgccgaccaccgcaaagctgaccattgagagcactcccttcaacgtggctgaggggaaggag
gtgctgctcctggtgcacaatctgccccagcacctgttcgggtactcctggtacaagggagaacgcgtggacgggaaccggcagatcata
ggctacgtcatcggaacccagcaggccacacccggtccagcgtacagcggccgggagattatctacccgaacgcctccctgctgatcca
aaacatcatccagaacgacaccggtttctacactctgcacgtgattaagtcagatctggtcaacgaagaggccaccggccaattcagggtgt
accccgaactccctaagccgttcatcacctcgaacaacagcaacccggtcgaggatgaagatgcggtggccttgacgtgcgaacctgag
atccagaacaccacctacttgtggtgggtgaacaatcagagcctgccagtctccccacgactccagctgtcgaacgacaacaggaccctg
actttgctgtccgtgactcggaacgacgtgggcccttatgaatgcggtatccagaacaagctgtccgtggaccacagcgaccctgtgatcct
gaacgtcctttacgggccggacgaccccaccatttccccgtcgtacacttactaccggccgggcgtgaacctgtccctgtcgtgccacgct
gcctccaatccgccggcccagtactcctggctcatcgacggaaacatccagcagcacacccaagaactgttcatctccaacattaccgaga
aaaactcgggactttacacctgtcaagccaacaattccgccagcggccactcccgcaccactgtcaaaactatcactgtgtccgccgaactc
ccgaagcccagcatcagctccaacaactcgaagcccgtggaggataaggacgctgtcgcgttcacctgtgaaccagaggcacagaatac
cacctacctttggtgggtcaacggacagtccctgcctgtctcaccgagactgcagctgtcaaacgggaataggactctgaccttgtttaacgt
cacccggaacgacgcccgggcctacgtgtgcggcatccagaactccgtgagcgcaaaccggtctgacccagtgaccctggatgtgctgt
acggccccgacactccgatcatttcaccccccgattcatcctacctgtccggcgctaacctcaacctctcatgccactccgcatccaacccc
agcccgcaatattcgtggcgcattaacggaattcctcagcaacatacccaggtcctgttcattgcgaagatcacccctaacaacaacggaac
ctacgcctgctttgtgtcaaacctggccactggtagaaacaactccatcgtgaagtccattaccgtgtcggcgtccggaacttccccgggcct
gagcgccggcgccaccgtgggaattatgatcggcgtgctcgtgggagtggccctgatc.
Plasmid 1426 Polypeptide

SEQ ID NO: 47

MASGAAPEPERTPVGQGSWAHPGRTRGPSDRGFCVVSPARPAEEATSLEGALSGTRHS
HPSVGRQHHAGPPSTSRPPRPWDTPCPPVYAETKHFLYSSGDKEQLRPSFLLSSLRPSLT
GARRLVETIFLGSRPWMPGTPRRLPRLPQRYWQMRPLFLELLGNHAQCPYGVLLKTHC
PLRAAVTPAAGVCAREKPQGSVAAPEEEDTDPRRLVQLLRQHSSPWQVYGFVRACLRR
LVPPGLWGSRHNERRFLRNTKKFISLGKHAKLSLQELTWKMSVRDCAWLRRSPGVGCV
PAAEHRLREEILAKFLHWLMSVYVVELLRSFFYVTETTFQKNRLFFYRKSVWSKLQSIGI
RQHLKRVQLRELSEAEVRQHREARPALLTSRLRFIPKPDGLRPIVNMDYVVGARTFRRE
KRAERLTSRVKALFSVLNYERARRPGLLGASVLGLDDIHRAWRTFVLRVRAQDPPPELY
FVKVAITGAYDTIPQDRLTEVIASIIKPQNTYCVRRYAVVQKAAHGHVRKAFKSHVSTL
TDLQPYMRQFVAHLQETSPLRDAVVIEQSSSLNEASSGLFDVFLRFMCHHAVRIRGKSY
VQCQGIPQGSILSTLLCSLCYGDMENKLFAGIRRDGLLLRLVDDFLLVTPHLTHAKTFLR
TLVRGVPEYGCVVNLRKTVVNFPVEDEALGGTAFVQMPAHGLFPWCGLLLDTRTLEV
QSDYSSYARTSIRASLTFNRGFKAGRNMRRKLFGVLRLKCHSLFLDLQVNSLQTVCTNI
YKILLLQAYRFHACVLQLPFHQQVWKNPTFFLRVISDTASLCYSILKAKNAGMSLGAKG
AAGPLPSEAVQWLCHQAFLLKLTRHRVTYVPLLGSLRTAQTQLSRKLPGTTLTALEAA
ANPALPSDFKTILDGSGTILSEGATNFSLLKLAGDVELNPGPTPGTQSPFFLLLLLTVLTV
VTGSGHASSTPGGEKETSATQRSSVPSSTEKNAVSMTSSVLSSHSPGSGSSTTQGQDVTL
APATEPASGSAATWGQDVTSVPVTRPALGSTTPPAHDVTSAPDNKPAPGSTAPPAHGVT
SAPDTRPAPGSTAPPAHGVTSAPDTRPAPGSTAPPAHGVTSAPDTRPAPGSTAPPAHGVT
SAPDTRPAPGSTAPPAHGVTSAPDTRPALGSTAPPVHNVTSASGSASGSASTLVHNGTSA
RATTTPASKSTPFSIPSHHSDTPTTLASHSTKTDASSTHHSSVPPLTSSNHSTSPQLSTGVS
FFFLSFHISNLQFNSSLEDPSTDYYQELQRDISEMFLQIYKQGGFLGLSNIKFRPGSVVVQ
LTLAFREGTINVHDVETQFNQYKTEAASRYNLTISDVSVSDVPFPFSAQSGAGVPGWGI
ALLVLVCVLVALAIVYLIALAVCQCRRKNYGQLDIFPARDTYHPMSEYPTYHTHGRYV
PPSSTDRSPYEKVSAGNGGSSLSYTNPAVAAASANLGSGRIFNAHYAGYFADLLIHDIET
NPGPESPSAPPHRWCIPWQRLLLTASLLTFWNPPTTAKLTIESTPFNVAEGKEVLLLVHN
LPQHLFGYSWYKGERVDGNRQIIGYVIGTQQATPGPAYSGREIIYPNASLLIQNIIQNDTG
FYTLHVIKSDLVNEEATGQFRVYPELPKPFITSNNSNPVEDEDAVALTCEPEIQNTTYLW
WVNNQSLPVSPRLQLSNDNRTLTLLSVTRNDVGPYECGIQNKLSVDHSDPVILNVLYGP
DDPTISPSYTYYRPGVNLSLSCHAASNPPAQYSWLIDGNIQQHTQELFISNITEKNSGLYT
CQANNSASGHSRTTVKTITVSAELPKPSISSNNSKPVEDKDAVAFTCEPEAQNTTYLWW
VNGQSLPVSPRLQLSNGNRTLTLFNVTRNDARAYVCGIQNSVSANRSDPVTLDVLYGPD
TPIISPPDSSYLSGANLNLSCHSASNPSPQYSWRINGIPQQHTQVLFIAKITPNNNGTYACF
VSNLATGRNNSIVKSITVSASGTSPGLSAGATVGIMIGVLVGVALI.
Plasmid 1427 ORF (nucleotide sequence)

SEQ ID NO: 48

atggctagcggagctgccccggagccggagaggacccccgttggccagggatcgtgggcccatccgggacgcaccaggggaccatc
cgacaggggattctgtgtggtgtcaccggccaggccagcagaagaggcaaccagcctcgagggagcgttgtctggaaccagacattccc
acccgtcggtgggccggcagcaccacgcgggaccaccgtccacttccagaccgccacggccatgggacaccccttgcccgcctgtgta
tgccgagactaaacacttcctgtactcatccggagacaaggaacagcttcggccgtccttcctcctgtcgtcgctcagaccgagcctgaccg
gagcacgcagattggtggaaactatcttccttgggtcacgtccgtggatgccaggtaccccacggcgcctcccgcgcctcccacagagat
actggcagatgcggcctctgttcctggaattgctgggaaaccacgctcagtgcccgtacggagtcctgctcaagactcactgccctctgag
ggcggcggtcactccggcggccggagtgtgcgcacgggagaagccccagggaagcgtggcagctccggaagaggaggacaccgat
ccgcgccgcctcgtgcaacttctgcgccagcactcctcgccctggcaagtctacgggttcgtccgcgcctgcctgcgccgcctggtgccg
cctgggctctggggttcccggcataacgagcgccgcttcctgagaaatactaagaagtttatctcacttggaaaacatgccaagttgtcgctg
caagaactcacgtggaagatgtcagtccgcgattgcgcctggctgcgccgctcgccgggcgtcgggtgtgttccagctgcagaacaccg
cctgagagaagaaattctggccaaatttctgcattggctgatgtcagtgtacgtggtcgagctgctgcgctcctttttctacgtcactgagacta
cctttcaaaagaaccgcctgttcttctaccgcaaatctgtgtggagcaagctgcagtcaatcggcattcgccagcatctgaagagggtgcag
ctgcgggaactttccgaggcagaagtccgccagcaccgggaggcccggccggcgcttctcacgtcgcgtctgagattcatcccaaagcc
cgacgggctgaggcctatcgtcaacatggattacgtcgtgggcgctcgcacctttcgccgtgaaaagcgggccgaacgcttgacctcacg
ggtgaaggccctcttctccgtgctgaactacgagagagcaagacggcctggcctgctgggagcttcggtgctgggactggacgatatcca
ccgggcttggcggacctttgttctccgggtgagagcccaagaccctccgccggaactgtacttcgtgaaggtggcgatcaccggagcctat
gatactattccgcaagatcgactcaccgaagtcatcgcctcgatcatcaaaccgcagaacacttactgcgtcaggcggtacgccgtggtcc
agaaggccgcgcatggccacgtgagaaaggcgttcaagtcgcacgtgtccactctcaccgacctccagccttacatgaggcaattcgttg
cgcatttgcaagagacttcgcccctgagagatgcggtggtcatcgagcagagctccagcctgaacgaagcgagcagcggtctgtttgacg
tgttcctccgcttcatgtgtcatcacgcggtgcgaatcaggggaaaatcatacgtgcagtgccagggaatcccacaaggcagcattctgtcg
actctcttgtgttccctttgctacggcgatatggaaaacaagctgttcgctgggatcagacgggacgggttgctgctcagactggtggacga
cttcctgctggtgactccgcacctcactcacgccaaaacctttctccgcactctggtgaggggagtgccagaatacggctgtgtggtcaatct
ccggaaaactgtggtgaatttccctgtcgaggatgaggcactcggaggaaccgcatttgtccaaatgccagcacatggcctgttcccatggt
gcggtctgctgctggacacccgaactcttgaagtgcagtccgactactccagctatgcccggacgagcatccgcgccagcctcactttcaa
tcgcggctttaaggccggacgaaacatgcgcagaaagcttttcggagtcctccggcttaaatgccattcgctctttctcgatctccaagtcaat
tcgctgcagaccgtgtgcacgaacatctacaagatcctgctgctccaagcctaccggttccacgcttgcgtgcttcagctgccgtttcaccaa
caggtgtggaagaacccgaccttctttctgcgggtcattagcgatactgcctccctgtgttactcaatcctcaaggcaaagaacgccggaat
gtcgctgggtgcgaaaggagccgcgggacctcttcctagcgaagcggtgcagtggctctgccaccaggctttcctcctgaagctgaccag
gcacagagtgacctacgtcccgctgctgggctcgctgcgcactgcacagacccagctgtctagaaaactccccggcaccaccctgaccg
ctctggaagccgccgccaacccagcattgccgtcagatttcaagaccatcttggacggatccggccagtgcaccaattacgccctgctgaa
gctggccggcgacgtggaatctaaccctggccctgaatcgccaagcgcaccccctcatcggtggtgcatcccttggcaacgcctcctcct
gaccgcctcactgctgactttctggaacccgccgaccaccgcaaagctgaccattgagagcactcccttcaacgtggctgaggggaagga
ggtgctgctcctggtgcacaatctgccccagcacctgttcgggtactcctggtacaagggagaacgcgtggacgggaaccggcagatcat
aggctacgtcatcggaacccagcaggccacacccggtccagcgtacagcggccgggagattatctacccgaacgcctccctgctgatcc
aaaacatcatccagaacgacaccggtttctacactctgcacgtgattaagtcagatctggtcaacgaagaggccaccggccaattcagggt
gtaccccgaactccctaagccgttcatcacctcgaacaacagcaacccggtcgaggatgaagatgcggtggccttgacgtgcgaacctga
gatccagaacaccacctacttgtggtgggtgaacaatcagagcctgccagtctccccacgactccagctgtcgaacgacaacaggaccct
gactttgctgtccgtgactcggaacgacgtgggcccttatgaatgcggtatccagaacaagctgtccgtggaccacagcgaccctgtgatc
ctgaacgtcctttacgggccggacgaccccaccatttccccgtcgtacacttactaccggccgggcgtgaacctgtccctgtcgtgccacg
ctgcctccaatccgccggcccagtactcctggctcatcgacggaaacatccagcagcacacccaagaactgttcatctccaacattaccga
gaaaaactcgggactttacacctgtcaagccaacaattccgccagcggccactcccgcaccactgtcaaaactatcactgtgtccgccgaa
ctcccgaagcccagcatcagctccaacaactcgaagcccgtggaggataaggacgctgtcgcgttcacctgtgaaccagaggcacagaa
taccacctacctttggtgggtcaacggacagtccctgcctgtctcaccgagactgcagctgtcaaacgggaataggactctgaccttgtttaa
cgtcacccggaacgacgcccgggcctacgtgtgcggcatccagaactccgtgagcgcaaaccggtctgacccagtgaccctggatgtgc
tgtacggccccgacactccgatcatttcaccccccgattcatcctacctgtccggcgctaacctcaacctctcatgccactccgcatccaacc
ccagcccgcaatattcgtggcgcattaacggaattcctcagcaacatacccaggtcctgttcattgcgaagatcacccctaacaacaacgga
acctacgcctgctttgtgtcaaacctggccactggtagaaacaactccatcgtgaagtccattaccgtgtcggcgtccggaacttccccggg
cctgagcgccggcgccaccgtgggaattatgatcggcgtgctcgtgggagtggccctgatcggatccggcgagggcagaggcagcctg
ctgacatgtggcgacgtggaagagaaccctggccccacccctggaacccagagccccttcttccttctgctgctgctgaccgtgctgactgt
cgtgacaggctctggccacgccagctctacacctggcggcgagaaagagacaagcgccacccagagaagcagcgtgccaagcagca
ccgagaagaacgccgtgtccatgaccagctccgtgctgagcagccactctcctggcagcggcagcagcacaacacagggccaggatgt
gacactggcccctgccacagaacctgcctctggatctgccgccacctggggacaggacgtgacaagcgtgccagtgaccagacctgcc
ctgggctctacaacaccccctgcccacgatgtgaccagcgcccctgataacaagcctgcccctggaagcacagcccctccagctcatggc
gtgacctctgccccagataccagaccagccccaggatctacagccccacccgcacacggcgtgacaagtgcccctgacacaagacccg
ctccaggctctactgctcctcctgcccatggcgtgacaagcgctcccgatacaaggccagctcctggctccacagcaccaccagcacatg
gcgtgacatcagctcccgacactagacctgctcccggatcaaccgctccaccagctcacggcgtgaccagcgcacctgataccagacct
gctctgggaagcaccgcccctcccgtgcacaatgtgacatctgcttccggcagcgccagcggctctgcctctacactggtgcacaacggc
accagcgccagagccacaacaaccccagccagcaagagcacccccttcagcatccctagccaccacagcgacacccctaccacactgg
ccagccactccaccaagaccgatgcctctagcacccaccactccagcgtgccccctctgaccagcagcaaccacagcacaagccccca
gctgtctaccggcgtctcattcttctttctgtccttccacatcagcaacctgcagttcaacagcagcctggaagatcccagcaccgactactac
caggaactgcagcgggatatcagcgagatgttcctgcaaatctacaagcagggcggcttcctgggcctgagcaacatcaagttcagaccc
ggcagcgtggtggtgcagctgaccctggctttccgggaaggcaccatcaacgtgcacgacgtggaaacccagttcaaccagtacaagac
cgaggccgccagccggtacaacctgaccatctccgatgtgtccgtgtccgacgtgcccttcccattctctgcccagtctggcgcaggcgtg
ccaggatggggaattgctctgctggtgctcgtgtgcgtgctggtggccctggccatcgtgtatctgattgccctggccgtgtgccagtgccg
gcggaagaattacggccagctggacatcttccccgccagagacacctaccaccccatgagcgagtaccccacataccacacccacggca
gatacgtgccacccagctccaccgacagatccccctacgagaaagtgtctgccggcaacggcggcagctccctgagctacacaaatcct
gccgtggccgctgcctccgccaacctg.
Plasmid 1427 Polypeptide

SEQ ID NO: 49

MASGAAPEPERTPVGQGSWAHPGRTRGPSDRGFCVVSPARPAEEATSLEGALSGTRHS
HPSVGRQHHAGPPSTSRPPRPWDTPCPPVYAETKHFLYSSGDKEQLRPSFLLSSLRPSLT
GARRLVETIFLGSRPWMPGTPRRLPRLPQRYWQMRPLFLELLGNHAQCPYGVLLKTHC
PLRAAVTPAAGVCAREKPQGSVAAPEEEDTDPRRLVQLLRQHSSPWQVYGFVRACLRR
LVPPGLWGSRHNERRFLRNTKKFISLGKHAKLSLQELTWKMSVRDCAWLRRSPGVGCV
PAAEHRLREEILAKFLHWLMSVYVVELLRSFFYVTETTFQKNRLFFYRKSVWSKLQSIGI
RQHLKRVQLRELSEAEVRQHREARPALLTSRLRFIPKPDGLRPIVNMDYVVGARTFRRE
KRAERLTSRVKALFSVLNYERARRPGLLGASVLGLDDIHRAWRTFVLRVRAQDPPPELY
FVKVAITGAYDTIPQDRLTEVIASIIKPQNTYCVRRYAVVQKAAHGHVRKAFKSHVSTL
TDLQPYMRQFVAHLQETSPLRDAVVIEQSSSLNEASSGLFDVFLRFMCHHAVRIRGKSY
VQCQGIPQGSILSTLLCSLCYGDMENKLFAGIRRDGLLLRLVDDFLLVTPHLTHAKTFLR
TLVRGVPEYGCVVNLRKTVVNFPVEDEALGGTAFVQMPAHGLFPWCGLLLDTRTLEV
QSDYSSYARTSIRASLTFNRGFKAGRNMRRKLFGVLRLKCHSLFLDLQVNSLQTVCTNI
YKILLLQAYRFHACVLQLPFHQQVWKNPTFFLRVISDTASLCYSILKAKNAGMSLGAKG
AAGPLPSEAVQWLCHQAFLLKLTRHRVTYVPLLGSLRTAQTQLSRKLPGTTLTALEAA
ANPALPSDFKTILDGSGQCTNYALLKLAGDVESNPGPESPSAPPHRWCIPWQRLLLTASL
LTFWNPPTTAKLTIESTPFNVAEGKEVLLLVHNLPQHLFGYSWYKGERVDGNRQIIGYVI
GTQQATPGPAYSGREIIYPNASLLIQNIIQNDTGFYTLHVIKSDLVNEEATGQFRVYPELP
KPFITSNNSNPVEDEDAVALTCEPEIQNTTYLWWVNNQSLPVSPRLQLSNDNRTLTLLSV
TRNDVGPYECGIQNKLSVDHSDPVILNVLYGPDDPTISPSYTYYRPGVNLSLSCHAASNP
PAQYSWLIDGNIQQHTQELFISNITEKNSGLYTCQANNSASGHSRTTVKTITVSAELPKPS
ISSNNSKPVEDKDAVAFTCEPEAQNTTYLWWVNGQSLPVSPRLQLSNGNRTLTLFNVTR
NDARAYVCGIQNSVSANRSDPVTLDVLYGPDTPIISPPDSSYLSGANLNLSCHSASNPSP
QYSWRINGIPQQHTQVLFIAKITPNNNGTYACFVSNLATGRNNSIVKSITVSASGTSPGLS
AGATVGIMIGVLVGVALIGSGEGRGSLLTCGDVEENPGPTPGTQSPFFLLLLLTVLTVVT
GSGHASSTPGGEKETSATQRSSVPSSTEKNAVSMTSSVLSSHSPGSGSSTTQGQDVTLAP
ATEPASGSAATWGQDVTSVPVTRPALGSTTPPAHDVTSAPDNKPAPGSTAPPAHGVTSA
PDTRPAPGSTAPPAHGVTSAPDTRPAPGSTAPPAHGVTSAPDTRPAPGSTAPPAHGVTSA
PDTRPAPGSTAPPAHGVTSAPDTRPALGSTAPPVHNVTSASGSASGSASTLVHNGTSAR
ATTTPASKSTPFSIPSHHSDTPTTLASHSTKTDASSTHHSSVPPLTSSNHSTSPQLSTGVSFF
FLSFHISNLQFNSSLEDPSTDYYQELQRDISEMFLQIYKQGGFLGLSNIKFRPGSVVVQLT
LAFREGTINVHDVETQFNQYKTEAASRYNLTISDVSVSDVPFPFSAQSGAGVPGWGIAL
LVLVCVLVALAIVYLIALAVCQCRRKNYGQLDIFPARDTYHPMSEYPTYHTHGRYVPPS
STDRSPYEKVSAGNGGSSLSYTNPAVAAASANL.
Plasmid 1428 ORF (nucleotide sequence)

SEQ ID NO: 50

atggctagcacccctggaacccagagccccttcttccttctgctgctgctgaccgtgctgactgtcgtgacaggctctggccacgccagctc
tacacctggcggcgagaaagagacaagcgccacccagagaagcagcgtgccaagcagcaccgagaagaacgccgtgtccatgacca
gctccgtgctgagcagccactctcctggcagcggcagcagcacaacacagggccaggatgtgacactggcccctgccacagaacctgc
ctctggatctgccgccacctggggacaggacgtgacaagcgtgccagtgaccagacctgccctgggctctacaacaccccctgcccacg
atgtgaccagcgcccctgataacaagcctgcccctggaagcacagcccctccagctcatggcgtgacctctgccccagataccagacca
gccccaggatctacagccccacccgcacacggcgtgacaagtgcccctgacacaagacccgctccaggctctactgctcctcctgcccat
ggcgtgacaagcgctcccgatacaaggccagctcctggctccacagcaccaccagcacatggcgtgacatcagctcccgacactagacc
tgctcccggatcaaccgctccaccagctcacggcgtgaccagcgcacctgataccagacctgctctgggaagcaccgcccctcccgtgc
acaatgtgacatctgcttccggcagcgccagcggctctgcctctacactggtgcacaacggcaccagcgccagagccacaacaacccca
gccagcaagagcacccccttcagcatccctagccaccacagcgacacccctaccacactggccagccactccaccaagaccgatgcctc
tagcacccaccactccagcgtgccccctctgaccagcagcaaccacagcacaagcccccagctgtctaccggcgtctcattcttctttctgt
ccttccacatcagcaacctgcagttcaacagcagcctggaagatcccagcaccgactactaccaggaactgcagcgggatatcagcgag
atgttcctgcaaatctacaagcagggcggcttcctgggcctgagcaacatcaagttcagacccggcagcgtggtggtgcagctgaccctg
gctttccgggaaggcaccatcaacgtgcacgacgtggaaacccagttcaaccagtacaagaccgaggccgccagccggtacaacctga
ccatctccgatgtgtccgtgtccgacgtgcccttcccattctctgcccagtctggcgcaggcgtgccaggatggggaattgctctgctggtgc
tcgtgtgcgtgctggtggccctggccatcgtgtatctgattgccctggccgtgtgccagtgccggcggaagaattacggccagctggacat
cttccccgccagagacacctaccaccccatgagcgagtaccccacataccacacccacggcagatacgtgccacccagctccaccgaca
gatccccctacgagaaagtgtctgccggcaacggcggcagctccctgagctacacaaatcctgccgtggccgctgcctccgccaacctg
ggatccggcagaatcttcaacgcccactacgccggctacttcgccgacctgctgatccacgacatcgagacaaaccctggccccaagctg
accattgagagcactcccttcaacgtggctgaggggaaggaggtgctgctcctggtgcacaatctgccccagcacctgttcgggtactcct
ggtacaagggagaacgcgtggacgggaaccggcagatcataggctacgtcatcggaacccagcaggccacacccggtccagcgtaca
gcggccgggagattatctacccgaacgcctccctgctgatccaaaacatcatccagaacgacaccggtttctacactctgcacgtgattaag
tcagatctggtcaacgaagaggccaccggccaattcagggtgtaccccgaactccctaagccgttcatcacctcgaacaacagcaacccg
gtcgaggatgaagatgcggtggccttgacgtgcgaacctgagatccagaacaccacctacttgtggtgggtgaacaatcagagcctgcca
gtctccccacgactccagctgtcgaacgacaacaggaccctgactttgctgtccgtgactcggaacgacgtgggcccttatgaatgcggtat
ccagaacaagctgtccgtggaccacagcgaccctgtgatcctgaacgtcctttacgggccggacgaccccaccatttccccgtcgtacact
tactaccggccgggcgtgaacctgtccctgtcgtgccacgctgcctccaatccgccggcccagtactcctggctcatcgacggaaacatcc
agcagcacacccaagaactgttcatctccaacattaccgagaaaaactcgggactttacacctgtcaagccaacaattccgccagcggcca
ctcccgcaccactgtcaaaactatcactgtgtccgccgaactcccgaagcccagcatcagctccaacaactcgaagcccgtggaggataa
ggacgctgtcgcgttcacctgtgaaccagaggcacagaataccacctacctttggtgggtcaacggacagtccctgcctgtctcaccgaga
ctgcagctgtcaaacgggaataggactctgaccttgtttaacgtcacccggaacgacgcccgggcctacgtgtgcggcatccagaactcc
gtgagcgcaaaccggtctgacccagtgaccctggatgtgctgtacggccccgacactccgatcatttcaccccccgattcatcctacctgtc
cggcgctaacctcaacctctcatgccactccgcatccaaccccagcccgcaatattcgtggcgcattaacggaattcctcagcaacataccc
aggtcctgttcattgcgaagatcacccctaacaacaacggaacctacgcctgctttgtgtcaaacctggccactggtagaaacaactccatc
gtgaagtccattaccgtgtcggcgtccggatccggcgagggcagaggcagcctgctgacatgtggcgacgtggaagagaaccctggcc
ccggagctgccccggagccggagaggacccccgttggccagggatcgtgggcccatccgggacgcaccaggggaccatccgacagg
ggattctgtgtggtgtcaccggccaggccagcagaagaggcaaccagcctcgagggagcgttgtctggaaccagacattcccacccgtc
ggtgggccggcagcaccacgcgggaccaccgtccacttccagaccgccacggccatgggacaccccttgcccgcctgtgtatgccgag
actaaacacttcctgtactcatccggagacaaggaacagcttcggccgtccttcctcctgtcgtcgctcagaccgagcctgaccggagcac
gcagattggtggaaactatcttccttgggtcacgtccgtggatgccaggtaccccacggcgcctcccgcgcctcccacagagatactggca
gatgcggcctctgttcctggaattgctgggaaaccacgctcagtgcccgtacggagtcctgctcaagactcactgccctctgagggcggcg
gtcactccggcggccggagtgtgcgcacgggagaagccccagggaagcgtggcagctccggaagaggaggacaccgatccgcgcc
gcctcgtgcaacttctgcgccagcactcctcgccctggcaagtctacgggttcgtccgcgcctgcctgcgccgcctggtgccgcctgggct
ctggggttcccggcataacgagcgccgcttcctgagaaatactaagaagtttatctcacttggaaaacatgccaagttgtcgctgcaagaact
cacgtggaagatgtcagtccgcgattgcgcctggctgcgccgctcgccgggcgtcgggtgtgttccagctgcagaacaccgcctgagag
aagaaattctggccaaatttctgcattggctgatgtcagtgtacgtggtcgagctgctgcgctcctttttctacgtcactgagactacctttcaaa
agaaccgcctgttcttctaccgcaaatctgtgtggagcaagctgcagtcaatcggcattcgccagcatctgaagagggtgcagctgcggga
actttccgaggcagaagtccgccagcaccgggaggcccggccggcgcttctcacgtcgcgtctgagattcatcccaaagcccgacgggc
tgaggcctatcgtcaacatggattacgtcgtgggcgctcgcacctttcgccgtgaaaagcgggccgaacgcttgacctcacgggtgaagg
ccctcttctccgtgctgaactacgagagagcaagacggcctggcctgctgggagcttcggtgctgggactggacgatatccaccgggctt
ggcggacctttgttctccgggtgagagcccaagaccctccgccggaactgtacttcgtgaaggtggcgatcaccggagcctatgatactatt
ccgcaagatcgactcaccgaagtcatcgcctcgatcatcaaaccgcagaacacttactgcgtcaggcggtacgccgtggtccagaaggcc
gcgcatggccacgtgagaaaggcgttcaagtcgcacgtgtccactctcaccgacctccagccttacatgaggcaattcgttgcgcatttgca
agagacttcgcccctgagagatgcggtggtcatcgagcagagctccagcctgaacgaagcgagcagcggtctgtttgacgtgttcctccg
cttcatgtgtcatcacgcggtgcgaatcaggggaaaatcatacgtgcagtgccagggaatcccacaaggcagcattctgtcgactctcttgt
gttccctttgctacggcgatatggaaaacaagctgttcgctgggatcagacgggacgggttgctgctcagactggtggacgacttcctgctg
gtgactccgcacctcactcacgccaaaacctttctccgcactctggtgaggggagtgccagaatacggctgtgtggtcaatctccggaaaa
ctgtggtgaatttccctgtcgaggatgaggcactcggaggaaccgcatttgtccaaatgccagcacatggcctgttcccatggtgcggtctg
ctgctggacacccgaactcttgaagtgcagtccgactactccagctatgcccggacgagcatccgcgccagcctcactttcaatcgcggctt
taaggccggacgaaacatgcgcagaaagcttttcggagtcctccggcttaaatgccattcgctctttctcgatctccaagtcaattcgctgca
gaccgtgtgcacgaacatctacaagatcctgctgctccaagcctaccggttccacgcttgcgtgcttcagctgccgtttcaccaacaggtgtg
gaagaacccgaccttctttctgcgggtcattagcgatactgcctccctgtgttactcaatcctcaaggcaaagaacgccggaatgtcgctgg
gtgcgaaaggagccgcgggacctcttcctagcgaagcggtgcagtggctctgccaccaggctttcctcctgaagctgaccaggcacaga
gtgacctacgtcccgctgctgggctcgctgcgcactgcacagacccagctgtctagaaaactccccggcaccaccctgaccgctctggaa
gccgccgccaacccagcattgccgtcagatttcaagaccatcttggac.
Plasmid 1428 Polypeptide

SEQ ID NO: 51

MASTPGTQSPFFLLLLLTVLTVVTGSGHASSTPGGEKETSATQRSSVPSSTEKNAVSMTS
SVLSSHSPGSGSSTTQGQDVTLAPATEPASGSAATWGQDVTSVPVTRPALGSTTPPAHD
VTSAPDNKPAPGSTAPPAHGVTSAPDTRPAPGSTAPPAHGVTSAPDTRPAPGSTAPPAHG
VTSAPDTRPAPGSTAPPAHGVTSAPDTRPAPGSTAPPAHGVTSAPDTRPALGSTAPPVHN
VTSASGSASGSASTLVHNGTSARATTTPASKSTPFSIPSHHSDTPTTLASHSTKTDASSTH
HSSVPPLTSSNHSTSPQLSTGVSFFFLSFHISNLQFNSSLEDPSTDYYQELQRDISEMFLQI
YKQGGFLGLSNIKFRPGSVVVQLTLAFREGTINVHDVETQFNQYKTEAASRYNLTISDV
SVSDVPFPFSAQSGAGVPGWGIALLVLVCVLVALAIVYLIALAVCQCRRKNYGQLDIFP
ARDTYHPMSEYPTYHTHGRYVPPSSTDRSPYEKVSAGNGGSSLSYTNPAVAAASANLG
SGRIFNAHYAGYFADLLIHDIETNPGPKLTIESTPFNVAEGKEVLLLVHNLPQHLFGYSW
YKGERVDGNRQIIGYVIGTQQATPGPAYSGREIIYPNASLLIQNIIQNDTGFYTLHVIKSDL
VNEEATGQFRVYPELPKPFITSNNSNPVEDEDAVALTCEPEIQNTTYLWWVNNQSLPVS
PRLQLSNDNRTLTLLSVTRNDVGPYECGIQNKLSVDHSDPVILNVLYGPDDPTISPSYTY
YRPGVNLSLSCHAASNPPAQYSWLIDGNIQQHTQELFISNITEKNSGLYTCQANNSASGH
SRTTVKTITVSAELPKPSISSNNSKPVEDKDAVAFTCEPEAQNTTYLWWVNGQSLPVSPR
LQLSNGNRTLTLFNVTRNDARAYVCGIQNSVSANRSDPVTLDVLYGPDTPIISPPDSSYL
SGANLNLSCHSASNPSPQYSWRINGIPQQHTQVLFIAKITPNNNGTYACFVSNLATGRNN
SIVKSITVSASGSGEGRGSLLTCGDVEENPGPGAAPEPERTPVGQGSWAHPGRTRGPSDR
GFCVVSPARPAEEATSLEGALSGTRHSHPSVGRQHHAGPPSTSRPPRPWDTPCPPVYAET
KHFLYSSGDKEQLRPSFLLSSLRPSLTGARRLVETIFLGSRPWMPGTPRRLPRLPQRYWQ
MRPLFLELLGNHAQCPYGVLLKTHCPLRAAVTPAAGVCAREKPQGSVAAPEEEDTDPR
RLVQLLRQHSSPWQVYGFVRACLRRLVPPGLWGSRHNERRFLRNTKKFISLGKHAKLS
LQELTWKMSVRDCAWLRRSPGVGCVPAAEHRLREEILAKFLHWLMSVYVVELLRSFF
YVTETTFQKNRLFFYRKSVWSKLQSIGIRQHLKRVQLRELSEAEVRQHREARPALLTSR
LRFIPKPDGLRPIVNMDYVVGARTFRREKRAERLTSRVKALFSVLNYERARRPGLLGAS
VLGLDDIHRAWRTFVLRVRAQDPPPELYFVKVAITGAYDTIPQDRLTEVIASIIKPQNTY
CVRRYAVVQKAAHGHVRKAFKSHVSTLTDLQPYMRQFVAHLQETSPLRDAVVIEQSSS
LNEASSGLFDVFLRFMCHHAVRIRGKSYVQCQGIPQGSILSTLLCSLCYGDMENKLFAGI
RRDGLLLRLVDDFLLVTPHLTHAKTFLRTLVRGVPEYGCVVNLRKTVVNFPVEDEALG
GTAFVQMPAHGLFPWCGLLLDTRTLEVQSDYSSYARTSIRASLTFNRGFKAGRNMRRK
LFGVLRLKCHSLFLDLQVNSLQTVCTNIYKILLLQAYRFHACVLQLPFHQQVWKNPTFF
LRVISDTASLCYSILKAKNAGMSLGAKGAAGPLPSEAVQWLCHQAFLLKLTRHRVTYV
PLLGSLRTAQTQLSRKLPGTTLTALEAAANPALPSDFKTILD.
Plasmid 1429 ORF (nucleotide sequence)

SEQ ID NO: 52

atggctagcaagctgaccattgagagcactcccttcaacgtggctgaggggaaggaggtgctgctcctggtgcacaatctgccccagcac
ctgttcgggtactcctggtacaagggagaacgcgtggacgggaaccggcagatcataggctacgtcatcggaacccagcaggccacac
ccggtccagcgtacagcggccgggagattatctacccgaacgcctccctgctgatccaaaacatcatccagaacgacaccggtttctacac
tctgcacgtgattaagtcagatctggtcaacgaagaggccaccggccaattcagggtgtaccccgaactccctaagccgttcatcacctcga
acaacagcaacccggtcgaggatgaagatgcggtggccttgacgtgcgaacctgagatccagaacaccacctacttgtggtgggtgaac
aatcagagcctgccagtctccccacgactccagctgtcgaacgacaacaggaccctgactttgctgtccgtgactcggaacgacgtgggc
ccttatgaatgcggtatccagaacaagctgtccgtggaccacagcgaccctgtgatcctgaacgtcctttacgggccggacgaccccacca
tttccccgtcgtacacttactaccggccgggcgtgaacctgtccctgtcgtgccacgctgcctccaatccgccggcccagtactcctggctc
atcgacggaaacatccagcagcacacccaagaactgttcatctccaacattaccgagaaaaactcgggactttacacctgtcaagccaaca
attccgccagcggccactcccgcaccactgtcaaaactatcactgtgtccgccgaactcccgaagcccagcatcagctccaacaactcga
agcccgtggaggataaggacgctgtcgcgttcacctgtgaaccagaggcacagaataccacctacctttggtgggtcaacggacagtccc
tgcctgtctcaccgagactgcagctgtcaaacgggaataggactctgaccttgtttaacgtcacccggaacgacgcccgggcctacgtgtg
cggcatccagaactccgtgagcgcaaaccggtctgacccagtgaccctggatgtgctgtacggccccgacactccgatcatttcaccccc
cgattcatcctacctgtccggcgctaacctcaacctctcatgccactccgcatccaaccccagcccgcaatattcgtggcgcattaacggaat
tcctcagcaacatacccaggtcctgttcattgcgaagatcacccctaacaacaacggaacctacgcctgctttgtgtcaaacctggccactg
gtagaaacaactccatcgtgaagtccattaccgtgtcggcgtccggatccggcgagggcagaggcagcctgctgacatgtggcgacgtg
gaagagaaccctggccccggagctgccccggagccggagaggacccccgttggccagggatcgtgggcccatccgggacgcaccag
gggaccatccgacaggggattctgtgtggtgtcaccggccaggccagcagaagaggcaaccagcctcgagggagcgttgtctggaacc
agacattcccacccgtcggtgggccggcagcaccacgcgggaccaccgtccacttccagaccgccacggccatgggacaccccttgcc
cgcctgtgtatgccgagactaaacacttcctgtactcatccggagacaaggaacagcttcggccgtccttcctcctgtcgtcgctcagaccg
agcctgaccggagcacgcagattggtggaaactatcttccttgggtcacgtccgtggatgccaggtaccccacggcgcctcccgcgcctc
ccacagagatactggcagatgcggcctctgttcctggaattgctgggaaaccacgctcagtgcccgtacggagtcctgctcaagactcact
gccctctgagggcggcggtcactccggcggccggagtgtgcgcacgggagaagccccagggaagcgtggcagctccggaagagga
ggacaccgatccgcgccgcctcgtgcaacttctgcgccagcactcctcgccctggcaagtctacgggttcgtccgcgcctgcctgcgccg
cctggtgccgcctgggctctggggttcccggcataacgagcgccgcttcctgagaaatactaagaagtttatctcacttggaaaacatgcca
agttgtcgctgcaagaactcacgtggaagatgtcagtccgcgattgcgcctggctgcgccgctcgccgggcgtcgggtgtgttccagctgc
agaacaccgcctgagagaagaaattctggccaaatttctgcattggctgatgtcagtgtacgtggtcgagctgctgcgctcctttttctacgtc
actgagactacctttcaaaagaaccgcctgttcttctaccgcaaatctgtgtggagcaagctgcagtcaatcggcattcgccagcatctgaag
agggtgcagctgcgggaactttccgaggcagaagtccgccagcaccgggaggcccggccggcgcttctcacgtcgcgtctgagattcat
cccaaagcccgacgggctgaggcctatcgtcaacatggattacgtcgtgggcgctcgcacctttcgccgtgaaaagcgggccgaacgctt
gacctcacgggtgaaggccctcttctccgtgctgaactacgagagagcaagacggcctggcctgctgggagcttcggtgctgggactgg
acgatatccaccgggcttggcggacctttgttctccgggtgagagcccaagaccctccgccggaactgtacttcgtgaaggtggcgatcac
cggagcctatgatactattccgcaagatcgactcaccgaagtcatcgcctcgatcatcaaaccgcagaacacttactgcgtcaggcggtac
gccgtggtccagaaggccgcgcatggccacgtgagaaaggcgttcaagtcgcacgtgtccactctcaccgacctccagccttacatgag
gcaattcgttgcgcatttgcaagagacttcgcccctgagagatgcggtggtcatcgagcagagctccagcctgaacgaagcgagcagcg
gtctgtttgacgtgttcctccgcttcatgtgtcatcacgcggtgcgaatcaggggaaaatcatacgtgcagtgccagggaatcccacaaggc
agcattctgtcgactctcttgtgttccctttgctacggcgatatggaaaacaagctgttcgctgggatcagacgggacgggttgctgctcaga
ctggtggacgacttcctgctggtgactccgcacctcactcacgccaaaacctttctccgcactctggtgaggggagtgccagaatacggct
gtgtggtcaatctccggaaaactgtggtgaatttccctgtcgaggatgaggcactcggaggaaccgcatttgtccaaatgccagcacatggc
ctgttcccatggtgcggtctgctgctggacacccgaactcttgaagtgcagtccgactactccagctatgcccggacgagcatccgcgcca
gcctcactttcaatcgcggctttaaggccggacgaaacatgcgcagaaagcttttcggagtcctccggcttaaatgccattcgctctttctcga
tctccaagtcaattcgctgcagaccgtgtgcacgaacatctacaagatcctgctgctccaagcctaccggttccacgcttgcgtgcttcagct
gccgtttcaccaacaggtgtggaagaacccgaccttctttctgcgggtcattagcgatactgcctccctgtgttactcaatcctcaaggcaaa
gaacgccggaatgtcgctgggtgcgaaaggagccgcgggacctcttcctagcgaagcggtgcagtggctctgccaccaggctttcctcct
gaagctgaccaggcacagagtgacctacgtcccgctgctgggctcgctgcgcactgcacagacccagctgtctagaaaactccccggca
ccaccctgaccgctctggaagccgccgccaacccagcattgccgtcagatttcaagaccatcttggacggatccggcacaatcctgtctga
gggcgccaccaacttcagcctgctgaaactggccggcgacgtggaactgaaccctggccctacccctggaacccagagccccttcttcct
tctgctgctgctgaccgtgctgactgtcgtgacaggctctggccacgccagctctacacctggcggcgagaaagagacaagcgccaccc
agagaagcagcgtgccaagcagcaccgagaagaacgccgtgtccatgaccagctccgtgctgagcagccactctcctggcagcggca
gcagcacaacacagggccaggatgtgacactggcccctgccacagaacctgcctctggatctgccgccacctggggacaggacgtgac
aagcgtgccagtgaccagacctgccctgggctctacaacaccccctgcccacgatgtgaccagcgcccctgataacaagcctgcccctg
gaagcacagcccctccagctcatggcgtgacctctgccccagataccagaccagccccaggatctacagccccacccgcacacggcgt
gacaagtgcccctgacacaagacccgctccaggctctactgctcctcctgcccatggcgtgacaagcgctcccgatacaaggccagctcc
tggctccacagcaccaccagcacatggcgtgacatcagctcccgacactagacctgctcccggatcaaccgctccaccagctcacggcgt
gaccagcgcacctgataccagacctgctctgggaagcaccgcccctcccgtgcacaatgtgacatctgcttccggcagcgccagcggct
ctgcctctacactggtgcacaacggcaccagcgccagagccacaacaaccccagccagcaagagcacccccttcagcatccctagcca
ccacagcgacacccctaccacactggccagccactccaccaagaccgatgcctctagcacccaccactccagcgtgccccctctgacca
gcagcaaccacagcacaagcccccagctgtctaccggcgtctcattcttctttctgtccttccacatcagcaacctgcagttcaacagcagcc
tggaagatcccagcaccgactactaccaggaactgcagcgggatatcagcgagatgttcctgcaaatctacaagcagggcggcttcctgg
gcctgagcaacatcaagttcagacccggcagcgtggtggtgcagctgaccctggctttccgggaaggcaccatcaacgtgcacgacgtg
gaaacccagttcaaccagtacaagaccgaggccgccagccggtacaacctgaccatctccgatgtgtccgtgtccgacgtgcccttcccat
tctctgcccagtctggcgcaggcgtgccaggatggggaattgctctgctggtgctcgtgtgcgtgctggtggccctggccatcgtgtatctg
attgccctggccgtgtgccagtgccggcggaagaattacggccagctggacatcttccccgccagagacacctaccaccccatgagcga
gtaccccacataccacacccacggcagatacgtgccacccagctccaccgacagatccccctacgagaaagtgtctgccggcaacggc
ggcagctccctgagctacacaaatcctgccgtggccgctgcctccgccaacctg.
Plasmid 1429 Polypeptide

SEQ ID NO: 53

MASKLTIESTPFNVAEGKEVLLLVHNLPQHLFGYSWYKGERVDGNRQIIGYVIGTQQAT
PGPAYSGREIIYPNASLLIQNIIQNDTGFYTLHVIKSDLVNEEATGQFRVYPELPKPFITSN
NSNPVEDEDAVALTCEPEIQNTTYLWWVNNQSLPVSPRLQLSNDNRTLTLLSVTRNDV
GPYECGIQNKLSVDHSDPVILNVLYGPDDPTISPSYTYYRPGVNLSLSCHAASNPPAQYS
WLIDGNIQQHTQELFISNITEKNSGLYTCQANNSASGHSRTTVKTITVSAELPKPSISSNNS
KPVEDKDAVAFTCEPEAQNTTYLWWVNGQSLPVSPRLQLSNGNRTLTLFNVTRNDAR
AYVCGIQNSVSANRSDPVTLDVLYGPDTPIISPPDSSYLSGANLNLSCHSASNPSPQYSW
RINGIPQQHTQVLFIAKITPNNNGTYACFVSNLATGRNNSIVKSITVSASGSGEGRGSLLT
CGDVEENPGPGAAPEPERTPVGQGSWAHPGRTRGPSDRGFCVVSPARPAEEATSLEGAL
SGTRHSHPSVGRQHHAGPPSTSRPPRPWDTPCPPVYAETKHFLYSSGDKEQLRPSFLLSS
LRPSLTGARRLVETIFLGSRPWMPGTPRRLPRLPQRYWQMRPLFLELLGNHAQCPYGVL
LKTHCPLRAAVTPAAGVCAREKPQGSVAAPEEEDTDPRRLVQLLRQHSSPWQVYGFVR
ACLRRLVPPGLWGSRHNERRFLRNTKKFISLGKHAKLSLQELTWKMSVRDCAWLRRSP
GVGCVPAAEHRLREEILAKFLHWLMSVYVVELLRSFFYVTETTFQKNRLFFYRKSVWS
KLQSIGIRQHLKRVQLRELSEAEVRQHREARPALLTSRLRFIPKPDGLRPIVNMDYVVGA
RTFRREKRAERLTSRVKALFSVLNYERARRPGLLGASVLGLDDIHRAWRTFVLRVRAQ
DPPPELYFVKVAITGAYDTIPQDRLTEVIASIIKPQNTYCVRRYAVVQKAAHGHVRKAF
KSHVSTLTDLQPYMRQFVAHLQETSPLRDAVVIEQSSSLNEASSGLFDVFLRFMCHHAV
RIRGKSYVQCQGIPQGSILSTLLCSLCYGDMENKLFAGIRRDGLLLRLVDDFLLVTPHLT
HAKTFLRTLVRGVPEYGCVVNLRKTVVNFPVEDEALGGTAFVQMPAHGLFPWCGLLL
DTRTLEVQSDYSSYARTSIRASLTFNRGFKAGRNMRRKLFGVLRLKCHSLFLDLQVNSL
QTVCTNIYKILLLQAYRFHACVLQLPFHQQVWKNPTFFLRVISDTASLCYSILKAKNAG
MSLGAKGAAGPLPSEAVQWLCHQAFLLKLTRHRVTYVPLLGSLRTAQTQLSRKLPGTT
LTALEAAANPALPSDFKTILDGSGTILSEGATNFSLLKLAGDVELNPGPTPGTQSPFFLLL
LLTVLTVVTGSGHASSTPGGEKETSATQRSSVPSSTEKNAVSMTSSVLSSHSPGSGSSTT
QGQDVTLAPATEPASGSAATWGQDVTSVPVTRPALGSTTPPAHDVTSAPDNKPAPGST
APPAHGVTSAPDTRPAPGSTAPPAHGVTSAPDTRPAPGSTAPPAHGVTSAPDTRPAPGST
APPAHGVTSAPDTRPAPGSTAPPAHGVTSAPDTRPALGSTAPPVHNVTSASGSASGSAST
LVHNGTSARATTTPASKSTPFSIPSHHSDTPTTLASHSTKTDASSTHHSSVPPLTSSNHSTS
PQLSTGVSFFFLSFHISNLQFNSSLEDPSTDYYQELQRDISEMFLQIYKQGGFLGLSNIKFR
PGSVVVQLTLAFREGTINVHDVETQFNQYKTEAASRYNLTISDVSVSDVPFPFSAQSGA
GVPGWGIALLVLVCVLVALAIVYLIALAVCQCRRKNYGQLDIFPARDTYHPMSEYPTY
HTHGRYVPPSSTDRSPYEKVSAGNGGSSLSYTNPAVAAASANL.
Plasmid 1428 complete vector (nucleotide sequence)

SEQ ID NO: 65

ggcgtaatgctctgccagtgttacaaccaattaaccaattctgattagaaaaactcatcgagcatcaaatgaaactgcaatttattcatatcagg
attatcaataccatatttttgaaaaagccgtttctgtaatgaaggagaaaactcaccgaggcagttccataggatggcaagatcctggtatcgg
tctgcgattccgactcgtccaacatcaatacaacctattaatttcccctcgtcaaaaataaggttatcaagtgagaaatcaccatgagtgacga
ctgaatccggtgagaatggcaaaagcttatgcatttctttccagacttgttcaacaggccagccattacgctcgtcatcaaaatcactcgcatc
aaccaaaccgttattcattcgtgattgcgcctgagcgagacgaaatacgcgatcgctgttaaaaggacaattacaaacaggaatcaaatgca
accggcgcaggaacactgccagcgcatcaacaatattttcacctgaatcaggatattcttctaatacctggaatgctgttttcccggggatcgc
agtggtgagtaaccatgcatcatcaggagtacggataaaatgcttgatggtcggaagaggcataaattccgtcagccagtttagtctgaccat
ctcatctgtaacatcattggcaacgctacctttgccatgtttcagaaacaactctggcgcatcgggcttcccatacaatcgatagattgtcgcac
ctgattgcccgacattatcgcgagcccatttatacccatataaatcagcatccatgttggaatttaatcgcggcctcgagcaagacgtttcccgt
tgaatatggctcataacaccccttgtattactgtttatgtaagcagacaggtcgacaatattggctattggccattgcatacgttgtatctatatcat
aatatgtacatttatattggctcatgtccaatatgaccgccatgttgacattgattattgactagttattaatagtaatcaattacggggtcattagtt
catagcccatatatggagttccgcgttacataacttacggtaaatggcccgcctggctgaccgcccaacgacccccgcccattgacgtcaat
aatgacgtatgttcccatagtaacgccaatagggactttccattgacgtcaatgggtggagtatttacggtaaactgcccacttggcagtacat
caagtgtatcatatgccaagtccgccccctattgacgtcaatgacggtaaatggcccgcctggcattatgcccagtacatgaccttacggga
ctttcctacttggcagtacatctacgtattagtcatcgctattaccatggtgatgcggttttggcagtacaccaatgggcgtggatagcggtttga
ctcacggggatttccaagtctccaccccattgacgtcaatgggagtttgttttggcaccaaaatcaacgggactttccaaaatgtcgtaataac
cccgccccgttgacgcaaatgggcggtaggcgtgtacggtgggaggtctatataagcagagctcgtttagtgaaccgtcagatcgcctgg
agacgccatccacgctgttttgacctccatagaagacaccgggaccgatccagcctccgcggccgggaacggtgcattggaacgcggat
tccccgtgccaagagtgactcaccgtccggatctcagcaagcaggtatgtactctccagggtgggcctggcttccccagtcaagactccag
ggatttgagggacgctgtgggctcttctcttacatgtaccttttgcttgcctcaaccctgactatcttccaggtcaggatcccagagtcaggggt
ctgtattttcctgctggtggctccagttcaggaacagtaaaccctgctccgaatattgcctctcacatctcgtcaatctccgcgaggactgggg
accctgtgacgaacatggctagcacccctggaacccagagccccttcttccttctgctgctgctgaccgtgctgactgtcgtgacaggctct
ggccacgccagctctacacctggcggcgagaaagagacaagcgccacccagagaagcagcgtgccaagcagcaccgagaagaacg
ccgtgtccatgaccagctccgtgctgagcagccactctcctggcagcggcagcagcacaacacagggccaggatgtgacactggcccct
gccacagaacctgcctctggatctgccgccacctggggacaggacgtgacaagcgtgccagtgaccagacctgccctgggctctacaac
accccctgcccacgatgtgaccagcgcccctgataacaagcctgcccctggaagcacagcccctccagctcatggcgtgacctctgcccc
agataccagaccagccccaggatctacagccccacccgcacacggcgtgacaagtgcccctgacacaagacccgctccaggctctact
gctcctcctgcccatggcgtgacaagcgctcccgatacaaggccagctcctggctccacagcaccaccagcacatggcgtgacatcagct
cccgacactagacctgctcccggatcaaccgctccaccagctcacggcgtgaccagcgcacctgataccagacctgctctgggaagcac
cgcccctcccgtgcacaatgtgacatctgcttccggcagcgccagcggctctgcctctacactggtgcacaacggcaccagcgccagag
ccacaacaaccccagccagcaagagcacccccttcagcatccctagccaccacagcgacacccctaccacactggccagccactccac
caagaccgatgcctctagcacccaccactccagcgtgccccctctgaccagcagcaaccacagcacaagcccccagctgtctaccggcg
tctcattcttctttctgtccttccacatcagcaacctgcagttcaacagcagcctggaagatcccagcaccgactactaccaggaactgcagc
gggatatcagcgagatgttcctgcaaatctacaagcagggcggcttcctgggcctgagcaacatcaagttcagacccggcagcgtggtgg
tgcagctgaccctggctttccgggaaggcaccatcaacgtgcacgacgtggaaacccagttcaaccagtacaagaccgaggccgccagc
cggtacaacctgaccatctccgatgtgtccgtgtccgacgtgcccttcccattctctgcccagtctggcgcaggcgtgccaggatggggaat
tgctctgctggtgctcgtgtgcgtgctggtggccctggccatcgtgtatctgattgccctggccgtgtgccagtgccggcggaagaattacg
gccagctggacatcttccccgccagagacacctaccaccccatgagcgagtaccccacataccacacccacggcagatacgtgccaccc
agctccaccgacagatccccctacgagaaagtgtctgccggcaacggcggcagctccctgagctacacaaatcctgccgtggccgctgc
ctccgccaacctgggatccggcagaatcttcaacgcccactacgccggctacttcgccgacctgctgatccacgacatcgagacaaaccc
tggccccaagctgaccattgagagcactcccttcaacgtggctgaggggaaggaggtgctgctcctggtgcacaatctgccccagcacct
gttcgggtactcctggtacaagggagaacgcgtggacgggaaccggcagatcataggctacgtcatcggaacccagcaggccacaccc
ggtccagcgtacagcggccgggagattatctacccgaacgcctccctgctgatccaaaacatcatccagaacgacaccggtttctacactc
tgcacgtgattaagtcagatctggtcaacgaagaggccaccggccaattcagggtgtaccccgaactccctaagccgttcatcacctcgaa
caacagcaacccggtcgaggatgaagatgcggtggccttgacgtgcgaacctgagatccagaacaccacctacttgtggtgggtgaaca
atcagagcctgccagtctccccacgactccagctgtcgaacgacaacaggaccctgactttgctgtccgtgactcggaacgacgtgggcc
cttatgaatgcggtatccagaacaagctgtccgtggaccacagcgaccctgtgatcctgaacgtcctttacgggccggacgaccccaccat
ttccccgtcgtacacttactaccggccgggcgtgaacctgtccctgtcgtgccacgctgcctccaatccgccggcccagtactcctggctca
tcgacggaaacatccagcagcacacccaagaactgttcatctccaacattaccgagaaaaactcgggactttacacctgtcaagccaacaa
ttccgccagcggccactcccgcaccactgtcaaaactatcactgtgtccgccgaactcccgaagcccagcatcagctccaacaactcgaa
gcccgtggaggataaggacgctgtcgcgttcacctgtgaaccagaggcacagaataccacctacctttggtgggtcaacggacagtccct
gcctgtctcaccgagactgcagctgtcaaacgggaataggactctgaccttgtttaacgtcacccggaacgacgcccgggcctacgtgtgc
ggcatccagaactccgtgagcgcaaaccggtctgacccagtgaccctggatgtgctgtacggccccgacactccgatcatttcacccccc
gattcatcctacctgtccggcgctaacctcaacctctcatgccactccgcatccaaccccagcccgcaatattcgtggcgcattaacggaatt
cctcagcaacatacccaggtcctgttcattgcgaagatcacccctaacaacaacggaacctacgcctgctttgtgtcaaacctggccactgg
tagaaacaactccatcgtgaagtccattaccgtgtcggcgtccggatccggcgagggcagaggcagcctgctgacatgtggcgacgtgg
aagagaaccctggccccggagctgccccggagccggagaggacccccgttggccagggatcgtgggcccatccgggacgcaccagg
ggaccatccgacaggggattctgtgtggtgtcaccggccaggccagcagaagaggcaaccagcctcgagggagcgttgtctggaacca
gacattcccacccgtcggtgggccggcagcaccacgcgggaccaccgtccacttccagaccgccacggccatgggacaccccttgccc
gcctgtgtatgccgagactaaacacttcctgtactcatccggagacaaggaacagcttcggccgtccttcctcctgtcgtcgctcagaccga
gcctgaccggagcacgcagattggtggaaactatcttccttgggtcacgtccgtggatgccaggtaccccacggcgcctcccgcgcctcc
cacagagatactggcagatgcggcctctgttcctggaattgctgggaaaccacgctcagtgcccgtacggagtcctgctcaagactcactg
ccctctgagggcggcggtcactccggcggccggagtgtgcgcacgggagaagccccagggaagcgtggcagctccggaagaggag
gacaccgatccgcgccgcctcgtgcaacttctgcgccagcactcctcgccctggcaagtctacgggttcgtccgcgcctgcctgcgccgc
ctggtgccgcctgggctctggggttcccggcataacgagcgccgcttcctgagaaatactaagaagtttatctcacttggaaaacatgccaa
gttgtcgctgcaagaactcacgtggaagatgtcagtccgcgattgcgcctggctgcgccgctcgccgggcgtcgggtgtgttccagctgca
gaacaccgcctgagagaagaaattctggccaaatttctgcattggctgatgtcagtgtacgtggtcgagctgctgcgctcctttttctacgtca
ctgagactacctttcaaaagaaccgcctgttcttctaccgcaaatctgtgtggagcaagctgcagtcaatcggcattcgccagcatctgaaga
gggtgcagctgcgggaactttccgaggcagaagtccgccagcaccgggaggcccggccggcgcttctcacgtcgcgtctgagattcatc
ccaaagcccgacgggctgaggcctatcgtcaacatggattacgtcgtgggcgctcgcacctttcgccgtgaaaagcgggccgaacgcttg
acctcacgggtgaaggccctcttctccgtgctgaactacgagagagcaagacggcctggcctgctgggagcttcggtgctgggactggac
gatatccaccgggcttggcggacctttgttctccgggtgagagcccaagaccctccgccggaactgtacttcgtgaaggtggcgatcaccg
gagcctatgatactattccgcaagatcgactcaccgaagtcatcgcctcgatcatcaaaccgcagaacacttactgcgtcaggcggtacgc
cgtggtccagaaggccgcgcatggccacgtgagaaaggcgttcaagtcgcacgtgtccactctcaccgacctccagccttacatgaggca
attcgttgcgcatttgcaagagacttcgcccctgagagatgcggtggtcatcgagcagagctccagcctgaacgaagcgagcagcggtct
gtttgacgtgttcctccgcttcatgtgtcatcacgcggtgcgaatcaggggaaaatcatacgtgcagtgccagggaatcccacaaggcagc
attctgtcgactctcttgtgttccctttgctacggcgatatggaaaacaagctgttcgctgggatcagacgggacgggttgctgctcagactgg
tggacgacttcctgctggtgactccgcacctcactcacgccaaaacctttctccgcactctggtgaggggagtgccagaatacggctgtgtg
gtcaatctccggaaaactgtggtgaatttccctgtcgaggatgaggcactcggaggaaccgcatttgtccaaatgccagcacatggcctgtt
cccatggtgcggtctgctgctggacacccgaactcttgaagtgcagtccgactactccagctatgcccggacgagcatccgcgccagcct
cactttcaatcgcggctttaaggccggacgaaacatgcgcagaaagcttttcggagtcctccggcttaaatgccattcgctctttctcgatctc
caagtcaattcgctgcagaccgtgtgcacgaacatctacaagatcctgctgctccaagcctaccggttccacgcttgcgtgcttcagctgcc
gtttcaccaacaggtgtggaagaacccgaccttctttctgcgggtcattagcgatactgcctccctgtgttactcaatcctcaaggcaaagaac
gccggaatgtcgctgggtgcgaaaggagccgcgggacctcttcctagcgaagcggtgcagtggctctgccaccaggctttcctcctgaag
ctgaccaggcacagagtgacctacgtcccgctgctgggctcgctgcgcactgcacagacccagctgtctagaaaactccccggcaccac
cctgaccgctctggaagccgccgccaacccagcattgccgtcagatttcaagaccatcttggactgaagatctgggccctaacaaaacaaa
aagatggggttattccctaaacttcatgggttacgtaattggaagttgggggacattgccacaagatcatattgtacaaaagatcaaacactgt
tttagaaaacttcctgtaaacaggcctattgattggaaagtatgtcaaaggattgtgggtcttttgggctttgctgctccatttacacaatgtggat
atcctgccttaatgcctttgtatgcatgtatacaagctaaacaggctttcactttctcgccaacttacaaggcctttctaagtaaacagtacatgaa
cctttaccccgttgctcggcaacggcctggtctgtgccaagtgtttgctgacgcaacccccactggctggggcttggccataggccatcagc
gcatgcgtggaacctttgtggctcctctgccgatccatactgcggaactcctagccgcttgttttgctcgcagccggtctggagcaaagctca
taggaactgacaattctgtcgtcctctcgcggaaatatacatcgtttcgatctacgtatgatctttttccctctgccaaaaattatggggacatcat
gaagccccttgagcatctgacttctggctaataaaggaaatttattttcattgcaatagtgtgttggaattttttgtgtctctcactcggaaggaatt
ctgcattaatgaatcggccaacgcgcggggagaggcggtttgcgtattgggcgctcttccgcttcctcgctcactgactcgctgcgctcggt
cgttcggctgcggcgagcggtatcagctcactcaaaggcggtaatacggttatccacagaatcaggggataacgcaggaaagaacatgtg
agcaaaaggccagcaaaaggccaggaaccgtaaaaaggccgcgttgctggcgtttttccataggctccgcccccctgacgagcatcaca
aaaatcgacgctcaagtcagaggtggcgaaacccgacaggactataaagataccaggcgtttccccctggaagctccctcgtgcgctctc
ctgttccgaccctgccgcttaccggatacctgtccgcctttctcccttcgggaagcgtggcgctttctcatagctcacgctgtaggtatctcagt
tcggtgtaggtcgttcgctccaagctgggctgtgtgcacgaaccccccgttcagcccgaccgctgcgccttatccggtaactatcgtcttga
gtccaacccggtaagacacgacttatcgccactggcagcagccactggtaacaggattagcagagcgaggtatgtaggcggtgctacag
agttcttgaagtggtggcctaactacggctacactagaagaacagtatttggtatctgcgctctgctgaagccagttaccttcggaaaaagag
ttggtagctcttgatccggcaaacaaaccaccgctggtagcggtggtttttttgtttgcaagcagcagattacgcgcagaaaaaaaggatctc
aagaagatcctttgatcttttctacggggtctgacgctcagtggaacgaaaactcacgttaagggattttggtcatgagattatcaaaaaggat
cttcacctagatccttttaaattaaaaatgaagttttaaatcaatctaaagtatatatgagtaaacttggtctgacagttaccaatgcttaatcagtg
aggcacctatctcagcgatctgtctatttcgttcatccatagttgcctgactc.
AdC68Y 1428 complete vector (nucleotide sequence)

SEQ ID NO: 66

ccatcttcaataatatacctcaaactttttgtgcgcgttaatatgcaaatgaggcgtttgaatttggggaggaagggcggtgattggtcgaggg
atgagcgaccgttaggggcggggcgagtgacgttttgatgacgtggttgcgaggaggagccagtttgcaagttctcgtgggaaaagtgac
gtcaaacgaggtgtggtttgaacacggaaatactcaattttcccgcgctctctgacaggaaatgaggtgtttctgggcggatgcaagtgaaa
acgggccattttcgcgcgaaaactgaatgaggaagtgaaaatctgagtaatttcgcgtttatggcagggaggagtatttgccgagggccga
gtagactttgaccgattacgtgggggtttcgattaccgtgtttttcacctaaatttccgcgtacggtgtcaaagtccggtgtttttactactgtaata
gtaatcaattacggggtcattagttcatagcccatatatggagttccgcgttacataacttacggtaaatggcccgcctggctgaccgcccaa
cgacccccgcccattgacgtcaataatgacgtatgttcccatagtaacgccaatagggactttccattgacgtcaatgggtggagtatttacg
gtaaactgcccacttggcagtacatcaagtgtatcatatgccaagtacgccccctattgacgtcaatgacggtaaatggcccgcctggcatta
tgcccagtacatgaccttatgggactttcctacttggcagtacatctacgtattagtcatcgctattaccatggtgatgcggttttggcagtacat
caatgggcgtggatagcggtttgactcacggggatttccaagtctccaccccattgacgtcaatgggagtttgttttggcaccaaaatcaacg
ggactttccaaaatgtcgtaacaactccgccccattgacgcaaatgggcggtaggcgtgtacggtgggaggtctatataagcagagctgtc
cctatcagtgatagagatctccctatcagtgatagagagtttagtgaaccgtcagatccgctagggtaccgcgatCACCatggctagcac
ccctggaacccagagccccttcttccttctgctgctgctgaccgtgctgactgtcgtgacaggctctggccacgccagctctacacctggcg
gcgagaaagagacaagcgccacccagagaagcagcgtgccaagcagcaccgagaagaacgccgtgtccatgaccagctccgtgctg
agcagccactctcctggcagcggcagcagcacaacacagggccaggatgtgacactggcccctgccacagaacctgcctctggatctgc
cgccacctggggacaggacgtgacaagcgtgccagtgaccagacctgccctgggctctacaacaccccctgcccacgatgtgaccagc
gcccctgataacaagcctgcccctggaagcacagcccctccagctcatggcgtgacctctgccccagataccagaccagccccaggatct
acagccccacccgcacacggcgtgacaagtgcccctgacacaagacccgctccaggctctactgctcctcctgcccatggcgtgacaag
cgctcccgatacaaggccagctcctggctccacagcaccaccagcacatggcgtgacatcagctcccgacactagacctgctcccggatc
aaccgctccaccagctcacggcgtgaccagcgcacctgataccagacctgctctgggaagcaccgcccctcccgtgcacaatgtgacat
ctgcttccggcagcgccagcggctctgcctctacactggtgcacaacggcaccagcgccagagccacaacaaccccagccagcaagag
cacccccttcagcatccctagccaccacagcgacacccctaccacactggccagccactccaccaagaccgatgcctctagcacccacc
actccagcgtgccccctctgaccagcagcaaccacagcacaagcccccagctgtctaccggcgtctcattcttctttctgtccttccacatca
gcaacctgcagttcaacagcagcctggaagatcccagcaccgactactaccaggaactgcagcgggatatcagcgagatgttcctgcaaa
tctacaagcagggcggcttcctgggcctgagcaacatcaagttcagacccggcagcgtggtggtgcagctgaccctggctttccgggaag
gcaccatcaacgtgcacgacgtggaaacccagttcaaccagtacaagaccgaggccgccagccggtacaacctgaccatctccgatgtg
tccgtgtccgacgtgcccttcccattctctgcccagtctggcgcaggcgtgccaggatggggaattgctctgctggtgctcgtgtgcgtgctg
gtggccctggccatcgtgtatctgattgccctggccgtgtgccagtgccggcggaagaattacggccagctggacatcttccccgccagag
acacctaccaccccatgagcgagtaccccacataccacacccacggcagatacgtgccacccagctccaccgacagatccccctacgag
aaagtgtctgccggcaacggcggcagctccctgagctacacaaatcctgccgtggccgctgcctccgccaacctgggatccggcagaat
cttcaacgcccactacgccggctacttcgccgacctgctgatccacgacatcgagacaaaccctggccccaagctgaccattgagagcac
tcccttcaacgtggctgaggggaaggaggtgctgctcctggtgcacaatctgccccagcacctgttcgggtactcctggtacaagggagaa
cgcgtggacgggaaccggcagatcataggctacgtcatcggaacccagcaggccacacccggtccagcgtacagcggccgggagatt
atctacccgaacgcctccctgctgatccaaaacatcatccagaacgacaccggtttctacactctgcacgtgattaagtcagatctggtcaac
gaagaggccaccggccaattcagggtgtaccccgaactccctaagccgttcatcacctcgaacaacagcaacccggtcgaggatgaaga
tgcggtggccttgacgtgcgaacctgagatccagaacaccacctacttgtggtgggtgaacaatcagagcctgccagtctccccacgactc
cagctgtcgaacgacaacaggaccctgactttgctgtccgtgactcggaacgacgtgggcccttatgaatgcggtatccagaacaagctgt
ccgtggaccacagcgaccctgtgatcctgaacgtcctttacgggccggacgaccccaccatttccccgtcgtacacttactaccggccggg
cgtgaacctgtccctgtcgtgccacgctgcctccaatccgccggcccagtactcctggctcatcgacggaaacatccagcagcacaccca
agaactgttcatctccaacattaccgagaaaaactcgggactttacacctgtcaagccaacaattccgccagcggccactcccgcaccactg
tcaaaactatcactgtgtccgccgaactcccgaagcccagcatcagctccaacaactcgaagcccgtggaggataaggacgctgtcgcgt
tcacctgtgaaccagaggcacagaataccacctacctttggtgggtcaacggacagtccctgcctgtctcaccgagactgcagctgtcaaa
cgggaataggactctgaccttgtttaacgtcacccggaacgacgcccgggcctacgtgtgcggcatccagaactccgtgagcgcaaacc
ggtctgacccagtgaccctggatgtgctgtacggccccgacactccgatcatttcaccccccgattcatcctacctgtccggcgctaacctca
acctctcatgccactccgcatccaaccccagcccgcaatattcgtggcgcattaacggaattcctcagcaacatacccaggtcctgttcattg
cgaagatcacccctaacaacaacggaacctacgcctgctttgtgtcaaacctggccactggtagaaacaactccatcgtgaagtccattacc
gtgtcggcgtccggatccggcgagggcagaggcagcctgctgacatgtggcgacgtggaagagaaccctggccccggagctgccccg
gagccggagaggacccccgttggccagggatcgtgggcccatccgggacgcaccaggggaccatccgacaggggattctgtgtggtgt
caccggccaggccagcagaagaggcaaccagcctcgagggagcgttgtctggaaccagacattcccacccgtcggtgggccggcagc
accacgcgggaccaccgtccacttccagaccgccacggccatgggacaccccttgcccgcctgtgtatgccgagactaaacacttcctgt
actcatccggagacaaggaacagcttcggccgtccttcctcctgtcgtcgctcagaccgagcctgaccggagcacgcagattggtggaaa
ctatcttccttgggtcacgtccgtggatgccaggtaccccacggcgcctcccgcgcctcccacagagatactggcagatgcggcctctgttc
ctggaattgctgggaaaccacgctcagtgcccgtacggagtcctgctcaagactcactgccctctgagggcggcggtcactccggcggcc
ggagtgtgcgcacgggagaagccccagggaagcgtggcagctccggaagaggaggacaccgatccgcgccgcctcgtgcaacttctg
cgccagcactcctcgccctggcaagtctacgggttcgtccgcgcctgcctgcgccgcctggtgccgcctgggctctggggttcccggcat
aacgagcgccgcttcctgagaaatactaagaagtttatctcacttggaaaacatgccaagttgtcgctgcaagaactcacgtggaagatgtc
agtccgcgattgcgcctggctgcgccgctcgccgggcgtcgggtgtgttccagctgcagaacaccgcctgagagaagaaattctggcca
aatttctgcattggctgatgtcagtgtacgtggtcgagctgctgcgctcctttttctacgtcactgagactacctttcaaaagaaccgcctgttctt
ctaccgcaaatctgtgtggagcaagctgcagtcaatcggcattcgccagcatctgaagagggtgcagctgcgggaactttccgaggcaga
agtccgccagcaccgggaggcccggccggcgcttctcacgtcgcgtctgagattcatcccaaagcccgacgggctgaggcctatcgtca
acatggattacgtcgtgggcgctcgcacctttcgccgtgaaaagcgggccgaacgcttgacctcacgggtgaaggccctcttctccgtgct
gaactacgagagagcaagacggcctggcctgctgggagcttcggtgctgggactggacgatatccaccgggcttggcggacctttgttct
ccgggtgagagcccaagaccctccgccggaactgtacttcgtgaaggtggcgatcaccggagcctatgatactattccgcaagatcgact
caccgaagtcatcgcctcgatcatcaaaccgcagaacacttactgcgtcaggcggtacgccgtggtccagaaggccgcgcatggccacg
tgagaaaggcgttcaagtcgcacgtgtccactctcaccgacctccagccttacatgaggcaattcgttgcgcatttgcaagagacttcgccc
ctgagagatgcggtggtcatcgagcagagctccagcctgaacgaagcgagcagcggtctgtttgacgtgttcctccgcttcatgtgtcatca
cgcggtgcgaatcaggggaaaatcatacgtgcagtgccagggaatcccacaaggcagcattctgtcgactctcttgtgttccctttgctacg
gcgatatggaaaacaagctgttcgctgggatcagacgggacgggttgctgctcagactggtggacgacttcctgctggtgactccgcacct
cactcacgccaaaacctttctccgcactctggtgaggggagtgccagaatacggctgtgtggtcaatctccggaaaactgtggtgaatttcc
ctgtcgaggatgaggcactcggaggaaccgcatttgtccaaatgccagcacatggcctgttcccatggtgcggtctgctgctggacacccg
aactcttgaagtgcagtccgactactccagctatgcccggacgagcatccgcgccagcctcactttcaatcgcggctttaaggccggacga
aacatgcgcagaaagcttttcggagtcctccggcttaaatgccattcgctctttctcgatctccaagtcaattcgctgcagaccgtgtgcacga
acatctacaagatcctgctgctccaagcctaccggttccacgcttgcgtgcttcagctgccgtttcaccaacaggtgtggaagaacccgacc
ttctttctgcgggtcattagcgatactgcctccctgtgttactcaatcctcaaggcaaagaacgccggaatgtcgctgggtgcgaaaggagcc
gcgggacctcttcctagcgaagcggtgcagtggctctgccaccaggctttcctcctgaagctgaccaggcacagagtgacctacgtcccg
ctgctgggctcgctgcgcactgcacagacccagctgtctagaaaactccccggcaccaccctgaccgctctggaagccgccgccaaccc
agcattgccgtcagatttcaagaccatcttggacTGAcgcaCctcgagctgatcataatcagccataccacatttgtagaggttttacttgct
ttaaaaaacctcccacacctccccctgaacctgaaacataaaatgaatgcaattgttgttgttaacttgtttattgcagcttataatggttacaaat
aaagcaatagcatcacaaatttcacaaataaagcatttttttcactgcattctagttgtggtttgtccaaactcatcaatgtatcttaccaggtgcc
gagcctgcgagtgcggagggaagcatgccaggttccagcccgtgtgtgtggatgtgacggaggacctgcgacccgatcatttggtgttgc
cctgcaccgggacggagttcggttccagcggggaagaatctgactagagtgagtagtgttctggggcgggggaggacctgcatgaggg
ccagaataactgaaatctgtgcttttctgtgtgttgcagcagcatgagcggaagcggctcctttgagggaggggtattcagcccttatctgac
ggggcgtctcccctcctgggcgggagtgcgtcagaatgtgatgggatccacggtggacggccggcccgtgcagcccgcgaactcttcaa
ccctgacctatgcaaccctgagctcttcgtcgttggacgcagctgccgccgcagctgctgcatctgccgccagcgccgtgcgcggaatgg
ccatgggcgccggctactacggcactctggtggccaactcgagttccaccaataatcccgccagcctgaacgaggagaagctgttgctgc
tgatggcccagctcgaggccttgacccagcgcctgggcgagctgacccagcaggtggctcagctgcaggagcagacgcgggccgcgg
ttgccacggtgaaatccaaataaaaaatgaatcaataaataaacggagacggttgttgattttaacacagagtctgaatctttatttgatttttcgc
gcgcggtaggccctggaccaccggtctcgatcattgagcacccggtggatcttttccaggacccggtagaggtgggcttggatgttgaggt
acatgggcatgagcccgtcccgggggtggaggtagctccattgcagggcctcgtgctcgggggtggtgttgtaaatcacccagtcatagc
aggggcgcagggcatggtgttgcacaatatctttgaggaggagactgatggccacgggcagccctttggtgtaggtgtttacaaatctgttg
agctgggagggatgcatgcggggggagatgaggtgcatcttggcctggatcttgagattggcgatgttaccgcccagatcccgcctgggg
ttcatgttgtgcaggaccaccagcacggtgtatccggtgcacttggggaatttatcatgcaacttggaagggaaggcgtgaaagaatttggc
gacgcctttgtgcccgcccaggttttccatgcactcatccatgatgatggcgatgggcccgtgggcggcggcctgggcaaagacgtttcgg
gggtcggacacatcatagttgtggtcctgggtgaggtcatcataggccattttaatgaatttggggcggagggtgccggactgggggacaa
aggtaccctcgatcccgggggcgtagttcccctcacagatctgcatctcccaggctttgagctcggagggggggatcatgtccacctgcgg
ggcgataaagaacacggtttccggggcgggggagatgagctgggccgaaagcaagttccggagcagctgggacttgccgcagccggt
ggggccgtagatgaccccgatgaccggctgcaggtggtagttgagggagagacagctgccgtcctcccggaggaggggggccacctc
gttcatcatctcgcgcacgtgcatgttctcgcgcaccagttccgccaggaggcgctctccccccagggataggagctcctggagcgaggc
gaagtttttcagcggcttgagtccgtcggccatgggcattttggagagggtttgttgcaagagttccaggcggtcccagagctcggtgatgtg
ctctacggcatctcgatccagcagacctcctcgtttcgcgggttgggacggctgcgggagtagggcaccagacgatgggcgtccagcgc
agccagggtccggtccttccagggtcgcagcgtccgcgtcagggtggtctccgtcacggtgaaggggtgcgcgccgggctgggcgctt
gcgagggtgcgcttcaggctcatccggctggtcgaaaaccgctcccgatcggcgccctgcgcgtcggccaggtagcaattgaccatgag
ttcgtagttgagcgcctcggccgcgtggcctttggcgcggagcttacctttggaagtctgcccgcaggcgggacagaggagggacttgag
ggcgtagagcttgggggcgaggaagacggactcgggggcgtaggcgtccgcgccgcagtgggcgcagacggtctcgcactccacga
gccaggtgaggtcgggctggtcggggtcaaaaaccagtttcccgccgttctttttgatgcgtttcttacctttggtctccatgagctcgtgtccc
cgctgggtgacaaagaggctgtccgtgtccccgtagaccgactttatgggccggtcctcgagcggtgtgccgcggtcctcctcgtagagg
aaccccgcccactccgagacgaaagcccgggtccaggccagcacgaaggaggccacgtgggacgggtagcggtcgttgtccaccag
cgggtccaccttttccagggtatgcaaacacatgtccccctcgtccacatccaggaaggtgattggcttgtaagtgtaggccacgtgaccgg
gggtcccggccgggggggtataaaagggtgcgggtccctgctcgtcctcactgtcttccggatcgctgtccaggagcgccagctgttggg
gtaggtattccctctcgaaggcgggcatgacctcggcactcaggttgtcagtttctagaaacgaggaggatttgatattgacggtgccggcg
gagatgcctttcaagagcccctcgtccatctggtcagaaaagacgatctttttgttgtcgagcttggtggcgaaggagccgtagagggcgtt
ggagaggagcttggcgatggagcgcatggtctggtttttttccttgtcggcgcgctccttggcggcgatgttgagctgcacgtactcgcgcg
ccacgcacttccattcggggaagacggtggtcagctcgtcgggcacgattctgacctgccagccccgattatgcagggtgatgaggtcca
cactggtggccacctcgccgcgcaggggctcattagtccagcagaggcgtccgcccttgcgcgagcagaaggggggcagggggtcca
gcatgacctcgtcgggggggtcggcatcgatggtgaagatgccgggcaggaggtcggggtcaaagtagctgatggaagtggccagatc
gtccagggcagcttgccattcgcgcacggccagcgcgcgctcgtagggactgaggggcgtgccccagggcatgggatgggtaagcgc
ggaggcgtacatgccgcagatgtcgtagacgtagaggggctcctcgaggatgccgatgtaggtggggtagcagcgccccccgcggatg
ctggcgcgcacgtagtcatacagctcgtgcgagggggcgaggagccccgggcccaggttggtgcgactgggcttttcggcgcggtaga
cgatctggcggaaaatggcatgcgagttggaggagatggtgggcctttggaagatgttgaagtgggcgtggggcagtccgaccgagtcg
cggatgaagtgggcgtaggagtcttgcagcttggcgacgagctcggcggtgactaggacgtccagagcgcagtagtcgagggtctcctg
gatgatgtcatacttgagctgtcccttttgtttccacagctcgcggttgagaaggaactcttcgcggtccttccagtactcttcgagggggaac
ccgtcctgatctgcacggtaagagcctagcatgtagaactggttgacggccttgtaggcgcagcagcccttctccacggggagggcgtag
gcctgggcggccttgcgcagggaggtgtgcgtgagggcgaaagtgtccctgaccatgaccttgaggaactggtgcttgaagtcgatatcg
tcgcagcccccctgctcccagagctggaagtccgtgcgcttcttgtaggcggggttgggcaaagcgaaagtaacatcgttgaagaggatct
tgcccgcgcggggcataaagttgcgagtgatgcggaaaggttggggcacctcggcccggttgttgatgacctgggcggcgagcacgatc
tcgtcgaagccgttgatgttgtggcccacgatgtagagttccacgaatcgcggacggcccttgacgtggggcagtttcttgagctcctcgta
ggtgagctcgtcggggtcgctgagcccgtgctgctcgagcgcccagtcggcgagatgggggttggcgcggaggaaggaagtccagag
atccacggccagggcggtttgcagacggtcccggtactgacggaactgctgcccgacggccattttttcgggggtgacgcagtagaaggt
gcgggggtccccgtgccagcgatcccatttgagctggagggcgagatcgagggcgagctcgacgagccggtcgtccccggagagtttc
atgaccagcatgaaggggacgagctgcttgccgaaggaccccatccaggtgtaggtttccacatcgtaggtgaggaagagcctttcggtg
cgaggatgcgagccgatggggaagaactggatctcctgccaccaattggaggaatggctgttgatgtgatggaagtagaaatgccgacg
gcgcgccgaacactcgtgcttgtgtttatacaagcggccacagtgctcgcaacgctgcacgggatgcacgtgctgcacgagctgtacctg
agttcctttgacgaggaatttcagtgggaagtggagtcgtggcgcctgcatctcgtgctgtactacgtcgtggtggtcggcctggccctcttct
gcctcgatggtggtcatgctgacgagcccgcgcgggaggcaggtccagacctcggcgcgagcgggtcggagagcgaggacgagggc
gcgcaggccggagctgtccagggtcctgagacgctgcggagtcaggtcagtgggcagcggcggcgcgcggttgacttgcaggagttttt
ccagggcgcgcgggaggtccagatggtacttgatctccaccgcgccattggtggcgacgtcgatggcttgcagggtcccgtgcccctgg
ggtgtgaccaccgtcccccgtttcttcttgggcggctggggcgacgggggcggtgcctcttccatggttagaagcggcggcgaggacgc
gcgccgggcggcaggggcggctcggggcccggaggcaggggcggcaggggcacgtcggcgccgcgcgcgggtaggttctggtac
tgcgcccggagaagactggcgtgagcgacgacgcgacggttgacgtcctggatctgacgcctctgggtgaaggccacgggacccgtga
gtttgaacctgaaagagagttcgacagaatcaatctcggtatcgttgacggcggcctgccgcaggatctcttgcacgtcgcccgagttgtcc
tggtaggcgatctcggtcatgaactgctcgatctcctcctcttgaaggtctccgcggccggcgcgctccacggtggccgcgaggtcgttgg
agatgcggcccatgagctgcgagaaggcgttcatgcccgcctcgttccagacgcggctgtagaccacgacgccctcgggatcgcGggc
gcgcatgaccacctgggcgaggttgagctccacgtggcgcgtgaagaccgcgtagttgcagaggcgctggtagaggtagttgagcgtg
gtggcgatgtgctcggtgacgaagaaatacatgatccagcggcggagcggcatctcgctgacgtcgcccagcgcctccaaacgttccatg
gcctcgtaaaagtccacggcgaagttgaaaaactgggagttgcgcgccgagacggtcaactcctcctccagaagacggatgagctcggc
gatggtggcgcgcacctcgcgctcgaaggcccccgggagttcctccacttcctcttcttcctcctccactaacatctcttctacttcctcctcag
gcggcagtggtggcgggggagggggcctgcgtcgccggcggcgcacgggcagacggtcgatgaagcgctcgatggtctcgccgcgc
cggcgtcgcatggtctcggtgacggcgcgcccgtcctcgcggggccgcagcgtgaagacgccgccgcgcatctccaggtggccgggg
gggtccccgttgggcagggagagggcgctgacgatgcatcttatcaattgccccgtagggactccgcgcaaggacctgagcgtctcgag
atccacgggatctgaaaaccgctgaacgaaggcttcgagccagtcgcagtcgcaaggtaggctgagcacggtttcttctggcgggtcatgt
tggttgggagcggggcgggcgatgctgctggtgatgaagttgaaataggcggttctgagacggcggatggtggcgaggagcaccaggt
ctttgggcccggcttgctggatgcgcagacggtcggccatgccccaggcgtggtcctgacacctggccaggtccttgtagtagtcctgcat
gagccgctccacgggcacctcctcctcgcccgcgcggccgtgcatgcgcgtgagcccgaagccgcgctggggctggacgagcgcca
ggtcggcgacgacgcgctcggcgaggatggcttgctggatctgggtgagggtggtctggaagtcatcaaagtcgacgaagcggtggtag
gctccggtgttgatggtgtaggagcagttggccatgacggaccagttgacggtctggtggcccggacgcacgagctcgtggtacttgagg
cgcgagtaggcgcgcgtgtcgaagatgtagtcgttgcaggtgcgcaccaggtactggtagccgatgaggaagtgcggcggcggctggc
ggtagagcggccatcgctcggtggcgggggcgccgggcgcgaggtcctcgagcatggtgcggtggtagccgtagatgtacctggacat
ccaggtgatgccggcggcggtggtggaggcgcgcgggaactcgcggacgcggttccagatgttgcgcagcggcaggaagtagttcat
ggtgggcacggtctggcccgtgaggcgcgcgcagtcgtggatgctctatacgggcaaaaacgaaagcggtcagcggctcgactccgtg
gcctggaggctaagcgaacgggttgggctgcgcgtgtaccccggttcgaatctcgaatcaggctggagccgcagctaacgtggtattggc
actcccgtctcgacccaagcctgcaccaaccctccaggatacggaggcgggtcgttttgcaacttttttttggaggccggatgagactagta
agcgcggaaagcggccgaccgcgatggctcgctgccgtagtctggagaagaatcgccagggttgcgttgcggtgtgccccggttcgag
gccggccggattccgcggctaacgagggcgtggctgccccgtcgtttccaagaccccatagccagccgacttctccagttacggagcga
gcccctcttttgttttgtttgtttttgccagatgcatcccgtactgcggcagatgcgcccccaccaccctccaccgcaacaacagccccctcca
cagccggcgcttctgcccccgccccagcagcaacttccagccacgaccgccgcggccgccgtgagcggggctggacagagttatgatc
accagctggccttggaagagggcgaggggctggcgcgcctgggggcgtcgtcgccggagcggcacccgcgcgtgcagatgaaaagg
gacgctcgcgaggcctacgtgcccaagcagaacctgttcagagacaggagcggcgaggagcccgaggagatgcgcgcggcccggtt
ccacgcggggcgggagctgcggcgcggcctggaccgaaagagggtgctgagggacgaggatttcgaggcggacgagctgacgggg
atcagccccgcgcgcgcgcacgtggccgcggccaacctggtcacggcgtacgagcagaccgtgaaggaggagagcaacttccaaaaa
tccttcaacaaccacgtgcgcaccctgatcgcgcgcgaggaggtgaccctgggcctgatgcacctgtgggacctgctggaggccatcgt
gcagaaccccaccagcaagccgctgacggcgcagctgttcctggtggtgcagcatagtcgggacaacgaagcgttcagggaggcgctg
ctgaatatcaccgagcccgagggccgctggctcctggacctggtgaacattctgcagagcatcgtggtgcaggagcgcgggctgccgct
gtccgagaagctggcggccatcaacttctcggtgctgagtttgggcaagtactacgctaggaagatctacaagaccccgtacgtgcccata
gacaaggaggtgaagatcgacgggttttacatgcgcatgaccctgaaagtgctgaccctgagcgacgatctgggggtgtaccgcaacga
caggatgcaccgtgcggtgagcgccagcaggcggcgcgagctgagcgaccaggagctgatgcatagtctgcagcgggccctgaccg
gggccgggaccgagggggagagctactttgacatgggcgcggacctgcactggcagcccagccgccgggccttggaggcggcggca
ggaccctacgtagaagaggtggacgatgaggtggacgaggagggcgagtacctggaagactgatggcgcgaccgtatttttgctagatg
caacaacaacagccacctcctgatcccgcgatgcgggcggcgctgcagagccagccgtccggcattaactcctcggacgattggaccca
ggccatgcaacgcatcatggcgctgacgacccgcaaccccgaagcctttagacagcagccccaggccaaccggctctcggccatcctg
gaggccgtggtgccctcgcgctccaaccccacgcacgagaaggtcctggccatcgtgaacgcgctggtggagaacaaggccatccgcg
gcgacgaggccggcctggtgtacaacgcgctgctggagcgcgtggcccgctacaacagcaccaacgtgcagaccaacctggaccgca
tggtgaccgacgtgcgcgaggccgtggcccagcgcgagcggttccaccgcgagtccaacctgggatccatggtggcgctgaacgcctt
cctcagcacccagcccgccaacgtgccccggggccaggaggactacaccaacttcatcagcgccctgcgcctgatggtgaccgaggtg
ccccagagcgaggtgtaccagtccgggccggactacttcttccagaccagtcgccagggcttgcagaccgtgaacctgagccaggctttc
aagaacttgcagggcctgtggggcgtgcaggccccggtcggggaccgcgcgacggtgtcgagcctgctgacgccgaactcgcgcctg
ctgctgctgctggtggcccccttcacggacagcggcagcatcaaccgcaactcgtacctgggctacctgattaacctgtaccgcgaggcc
atcggccaggcgcacgtggacgagcagacctaccaggagatcacccacgtgagccgcgccctgggccaggacgacccgggcaacct
ggaagccaccctgaactttttgctgaccaaccggtcgcagaagatcccgccccagtacgcgctcagcaccgaggaggagcgcatcctgc
gttacgtgcagcagagcgtgggcctgttcctgatgcaggagggggccacccccagcgccgcgctcgacatgaccgcgcgcaacatgga
gcccagcatgtacgccagcaaccgcccgttcatcaataaactgatggactacttgcatcgggcggccgccatgaactctgactatttcacca
acgccatcctgaatccccactggctcccgccgccggggttctacacgggcgagtacgacatgcccgaccccaatgacgggttcctgtgg
gacgatgtggacagcagcgtgttctccccccgaccgggtgctaacgagcgccccttgtggaagaaggaaggcagcgaccgacgcccgt
cctcggcgctgtccggccgcgagggtgctgccgcggcggtgcccgaggccgccagtcctttcccgagcttgcccttctcgctgaacagta
tccgcagcagcgagctgggcaggatcacgcgcccgcgcttgctgggcgaagaggagtacttgaatgactcgctgttgagacccgagcg
ggagaagaacttccccaataacgggatagaaagcctggtggacaagatgagccgctggaagacgtatgcgcaggagcacagggacga
tccccgggcgtcgcagggggccacgagccggggcagcgccgcccgtaaacgccggtggcacgacaggcagcggggacagatgtgg
gacgatgaggactccgccgacgacagcagcgtgttggacttgggtgggagtggtaacccgttcgctcacctgcgcccccgtatcgggcg
catgatgtaagagaaaccgaaaataaatgatactcaccaaggccatggcgaccagcgtgcgttcgtttcttctctgttgttgttgtatctagtat
gatgaggcgtgcgtacccggagggtcctcctccctcgtacgagagcgtgatgcagcaggcgatggcggcggcggcgatgcagccccc
gctggaggctccttacgtgcccccgcggtacctggcgcctacggaggggcggaacagcattcgttactcggagctggcacccttgtacga
taccacccggttgtacctggtggacaacaagtcggcggacatcgcctcgctgaactaccagaacgaccacagcaacttcctgaccaccgt
ggtgcagaacaatgacttcacccccacggaggccagcacccagaccatcaactttgacgagcgctcgcggtggggcggccagctgaaa
accatcatgcacaccaacatgcccaacgtgaacgagttcatgtacagcaacaagttcaaggcgcgggtgatggtctcccgcaagaccccc
aatggggtgacagtgacagaggattatgatggtagtcaggatgagctgaagtatgaatgggtggaatttgagctgcccgaaggcaacttct
cggtgaccatgaccatcgacctgatgaacaacgccatcatcgacaattacttggcggtggggcggcagaacggggtgctggagagcgac
atcggcgtgaagttcgacactaggaacttcaggctgggctgggaccccgtgaccgagctggtcatgcccggggtgtacaccaacgaggc
tttccatcccgatattgtcttgctgcccggctgcggggtggacttcaccgagagccgcctcagcaacctgctgggcattcgcaagaggcag
cccttccaggaaggcttccagatcatgtacgaggatctggaggggggcaacatccccgcgctcctggatgtcgacgcctatgagaaaagc
aaggaggatgcagcagctgaagcaactgcagccgtagctaccgcctctaccgaggtcaggggcgataattttgcaagcgccgcagcagt
ggcagcggccgaggcggctgaaaccgaaagtaagatagtcattcagccggtggagaaggatagcaagaacaggagctacaacgtacta
ccggacaagataaacaccgcctaccgcagctggtacctagcctacaactatggcgaccccgagaagggcgtgcgctcctggacgctgct
caccacctcggacgtcacctgcggcgtggagcaagtctactggtcgctgcccgacatgatgcaagacccggtcaccttccgctccacgcg
tcaagttagcaactacccggtggtgggcgccgagctcctgcccgtctactccaagagcttcttcaacgagcaggccgtctactcgcagcag
ctgcgcgccttcacctcgcttacgcacgtcttcaaccgcttccccgagaaccagatcctcgtccgcccgcccgcgcccaccattaccaccg
tcagtgaaaacgttcctgctctcacagatcacgggaccctgccgctgcgcagcagtatccggggagtccagcgcgtgaccgttactgacg
ccagacgccgcacctgcccctacgtctacaaggccctgggcatagtcgcgccgcgcgtcctctcgagccgcaccttctaaatgtccattct
catctcgcccagtaataacaccggttggggcctgcgcgcgcccagcaagatgtacggaggcgctcgccaacgctccacgcaacacccc
gtgcgcgtgcgcgggcacttccgcgctccctggggcgccctcaagggccgcgtgcggtcgcgcaccaccgtcgacgacgtgatcgacc
aggtggtggccgacgcgcgcaactacacccccgccgccgcgcccgtctccaccgtggacgccgtcatcgacagcgtggtggcCgacg
cgcgccggtacgcccgcgccaagagccggcggcggcgcatcgcccggcggcaccggagcacccccgccatgcgcgcggcgcgag
ccttgctgcgcagggccaggcgcacgggacgcagggccatgctcagggcggccagacgcgcggcttcaggcgccagcgccggcag
gacccggagacgcgcggccacggcggcggcagcggccatcgccagcatgtcccgcccgcggcgagggaacgtgtactgggtgcgc
gacgccgccaccggtgtgcgcgtgcccgtgcgcacccgcccccctcgcacttgaagatgttcacttcgcgatgttgatgtgtcccagcgg
cgaggaggatgtccaagcgcaaattcaaggaagagatgctccaggtcatcgcgcctgagatctacggccctgcggtggtgaaggagga
aagaaagccccgcaaaatcaagcgggtcaaaaaggacaaaaaggaagaagaaagtgatgtggacggattggtggagtttgtgcgcgag
ttcgccccccggcggcgcgtgcagtggcgcgggcggaaggtgcaaccggtgctgagacccggcaccaccgtggtcttcacgcccggc
gagcgctccggcaccgcttccaagcgctcctacgacgaggtgtacggggatgatgatattctggagcaggcggccgagcgcctgggcg
agtttgcttacggcaagcgcagccgttccgcaccgaaggaagaggcggtgtccatcccgctggaccacggcaaccccacgccgagcct
caagcccgtgaccttgcagcaggtgctgccgaccgcggcgccgcgccgggggttcaagcgcgagggcgaggatctgtaccccaccat
gcagctgatggtgcccaagcgccagaagctggaagacgtgctggagaccatgaaggtggacccggacgtgcagcccgaggtcaaggt
gcggcccatcaagcaggtggccccgggcctgggcgtgcagaccgtggacatcaagattcccacggagcccatggaaacgcagaccga
gcccatgatcaagcccagcaccagcaccatggaggtgcagacggatccctggatgccatcggctcctagtcgaagaccccggcgcaag
tacggcgcggccagcctgctgatgcccaactacgcgctgcatccttccatcatccccacgccgggctaccgcggcacgcgcttctaccgc
ggtcataccagcagccgccgccgcaagaccaccactcgccgccgccgtcgccgcaccgccgctgcaaccacccctgccgccctggtg
cggagagtgtaccgccgcggccgcgcacctctgaccctgccgcgcgcgcgctaccacccgagcatcgccatttaaactttcgccTgcttt
gcagatcaatggccctcacatgccgccttcgcgttcccattacgggctaccgaggaagaaaaccgcgccgtagaaggctggcggggaac
gggatgcgtcgccaccaccaccggcggcggcgcgccatcagcaagcggttggggggaggcttcctgcccgcgctgatccccatcatcg
ccgcggcgatcggggcgatccccggcattgcttccgtggcggtgcaggcctctcagcgccactgagacacacttggaaacatcttgtaat
aaaccAatggactctgacgctcctggtcctgtgatgtgttttcgtagacagatggaagacatcaatttttcgtccctggctccgcgacacggc
acgcggccgttcatgggcacctggagcgacatcggcaccagccaactgaacgggggcgccttcaattggagcagtctctggagcgggc
ttaagaatttcgggtccacgcttaaaacctatggcagcaaggcgtggaacagcaccacagggcaggcgctgagggataagctgaaagag
cagaacttccagcagaaggtggtcgatgggctcgcctcgggcatcaacggggtggtggacctggccaaccaggccgtgcagcggcag
atcaacagccgcctggacccggtgccgcccgccggctccgtggagatgccgcaggtggaggaggagctgcctcccctggacaagcgg
ggcgagaagcgaccccgccccgatgcggaggagacgctgctgacgcacacggacgagccgcccccgtacgaggaggcggtgaaac
tgggtctgcccaccacgcggcccatcgcgcccctggccaccggggtgctgaaacccgaaaagcccgcgaccctggacttgcctcctccc
cagccttcccgcccctctacagtggctaagcccctgccgccggtggccgtggcccgcgcgcgacccgggggcaccgcccgccctcatg
cgaactggcagagcactctgaacagcatcgtgggtctgggagtgcagagtgtgaagcgccgccgctgctattaaacctaccgtagcgctt
aacttgcttgtctgtgtgtgtatgtattatgtcgccgccgccgctgtccaccagaaggaggagtgaagaggcgcgtcgccgagttgcaagat
ggccaccccatcgatgctgccccagtgggcgtacatgcacatcgccggacaggacgcttcggagtacctgagtccgggtctggtgcagtt
tgcccgcgccacagacacctacttcagtctggggaacaagtttaggaaccccacggtggcgcccacgcacgatgtgaccaccgaccgca
gccagcggctgacgctgcgcttcgtgcccgtggaccgcgaggacaacacctactcgtacaaagtgcgctacacgctggccgtgggcga
caaccgcgtgctggacatggccagcacctactttgacatccgcggcgtgctggatcggggccctagcttcaaaccctactccggcaccgc
ctacaacagtctggcccccaagggagcacccaacacttgtcagtggacatataaagccgatggtgaaactgccacagaaaaaacctatac
atatggaaatgcacccgtgcagggcattaacatcacaaaagatggtattcaacttggaactgacaccgatgatcagccaatctacgcagata
aaacctatcagcctgaacctcaagtgggtgatgctgaatggcatgacatcactggtactgatgaaaagtatggaggcagagctcttaagcct
gataccaaaatgaagccttgttatggttcttttgccaagcctactaataaagaaggaggtcaggcaaatgtgaaaacaggaacaggcactac
taaagaatatgacatagacatggctttctttgacaacagaagtgcggctgctgctggcctagctccagaaattgttttgtatactgaaaatgtgg
atttggaaactccagatacccatattgtatacaaagcaggcacagatgacagcagctcttctattaatttgggtcagcaagccatgcccaaca
gacctaactacattggtttcagagacaactttatcgggctcatgtactacaacagcactggcaatatgggggtgctggccggtcaggcttctc
agctgaatgctgtggttgacttgcaagacagaaacaccgagctgtcctaccagctcttgcttgactctctgggtgacagaacccggtatttca
gtatgtggaatcaggcggtggacagctatgatcctgatgtgcgcattattgaaaatcatggtgtggaggatgaacttcccaactattgtttccct
ctggatgctgttggcagaacagatacttatcagggaattaaggctaatggaactgatcaaaccacatggaccaaagatgacagtgtcaatga
tgctaatgagataggcaagggtaatccattcgccatggaaatcaacatccaagccaacctgtggaggaacttcctctacgccaacgtggcc
ctgtacctgcccgactcttacaagtacacgccggccaatgttaccctgcccaccaacaccaacacctacgattacatgaacggccgggtgg
tggcgccctcgctggtggactcctacatcaacatcggggcgcgctggtcgctggatcccatggacaacgtgaaccccttcaaccaccacc
gcaatgcggggctgcgctaccgctccatgctcctgggcaacgggcgctacgtgcccttccacatccaggtgccccagaaatttttcgccat
caagagcctcctgctcctgcccgggtcctacacctacgagtggaacttccgcaaggacgtcaacatgatcctgcagagctccctcggcaa
cgacctgcgcacggacggggcctccatctccttcaccagcatcaacctctacgccaccttcttccccatggcgcacaacacggcctccacg
ctcgaggccatgctgcgcaacgacaccaacgaccagtccttcaacgactacctctcggcggccaacatgctctaccccatcccggccaac
gccaccaacgtgcccatctccatcccctcgcgcaactgggccgccttccgcggctggtccttcacgcgtctcaagaccaaggagacgccc
tcgctgggctccgggttcgacccctacttcgtctactcgggctccatcccctacctcgacggcaccttctacctcaaccacaccttcaagaag
gtctccatcaccttcgactcctccgtcagctggcccggcaacgaccggctcctgacgcccaacgagttcgaaatcaagcgcaccgtcgac
ggcgagggctacaacgtggcccagtgcaacatgaccaaggactggttcctggtccagatgctggcccactacaacatcggctaccaggg
cttctacgtgcccgagggctacaaggaccgcatgtactccttcttccgcaacttccagcccatgagccgccaggtggtggacgaggtcaac
tacaaggactaccaggccgtcaccctggcctaccagcacaacaactcgggcttcgtcggctacctcgcgcccaccatgcgccagggcca
gccctaccccgccaactacccctacccgctcatcggcaagagcgccgtcaccagcgtcacccagaaaaagttcctctgcgacagggtcat
gtggcgcatccccttctccagcaacttcatgtccatgggcgcgctcaccgacctcggccagaacatgctctatgccaactccgcccacgcg
ctagacatgaatttcgaagtcgaccccatggatgagtccacccttctctatgttgtcttcgaagtcttcgacgtcgtccgagtgcaccagcccc
accgcggcgtcatcgaggccgtctacctgcgcacccccttctcggccggtaacgccaccacctaagctcttgcttcttgcaagccatggcc
gcgggctccggcgagcaggagctcagggccatcatccgcgacctgggctgcgggccctacttcctgggcaccttcgataagcgcttccc
gggattcatggccccgcacaagctggcctgcgccatcgtcaacacggccggccgcgagaccgggggcgagcactggctggccttcgc
ctggaacccgcgctcgaacacctgctacctcttcgaccccttcgggttctcggacgagcgcctcaagcagatctaccagttcgagtacgag
ggcctgctgcgccgcagcgccctggccaccgaggaccgctgcgtcaccctggaaaagtccacccagaccgtgcagggtccgcgctcg
gccgcctgcgggctcttctgctgcatgttcctgcacgccttcgtgcactggcccgaccgccccatggacaagaaccccaccatgaacttgc
tgacgggggtgcccaacggcatgctccagtcgccccaggtggaacccaccctgcgccgcaaccaggaggcgctctaccgcttcctcaa
ctcccactccgcctactttcgctcccaccgcgcgcgcatcgagaaggccaccgccttcgaccgcatgaatcaagacatgtaaaccgtgtgt
gtatgttaaatgtctttaataaacagcactttcatgttacacatgcatctgagatgatttatttagaaatcgaaagggttctgccgggtctcggcat
ggcccgcgggcagggacacgttgcggaactggtacttggccagccacttgaactcggggatcagcagtttgggcagcggggtgtcggg
gaaggagtcggtccacagcttccgcgtcagttgcagggcgcccagcaggtcgggcgcggagatcttgaaatcgcagttgggacccgcgt
tctgcgcgcgggagttgcggtacacggggttgcagcactggaacaccatcagggccgggtgcttcacgctcgccagcaccgtcgcgtcg
gtgatgctctccacgtcgaggtcctcggcgttggccatcccgaagggggtcatcttgcaggtctgccttcccatggtgggcacgcacccgg
gcttgtggttgcaatcgcagtgcagggggatcagcatcatctgggcctggtcggcgttcatccccgggtacatggccttcatgaaagcctcc
aattgcctgaacgcctgctgggccttggctccctcggtgaagaagaccccgcaggacttgctagagaactggttggtggcgcacccggcg
tcgtgcacgcagcagcgcgcgtcgttgttggccagctgcaccacgctgcgcccccagcggttctgggtgatcttggcccggtcggggttct
ccttcagcgcgcgctgcccgttctcgctcgccacatccatctcgatcatgtgctccttctggatcatggtggtcccgtgcaggcaccgcagct
tgccctcggcctcggtgcacccgtgcagccacagcgcgcacccggtgcactcccagttcttgtgggcgatctgggaatgcgcgtgcacg
aagccctgcaggaagcggcccatcatggtggtcagggtcttgttgctagtgaaggtcagcggaatgccgcggtgctcctcgttgatgtaca
ggtggcagatgcggcggtacacctcgccctgctcgggcatcagctggaagttggctttcaggtcggtctccacgcggtagcggtccatca
gcatagtcatgatttccatacccttctcccaggccgagacgatgggcaggctcatagggttcttcaccatcatcttagcgctagcagccgcg
gccagggggtcgctctcgtccagggtctcaaagctccgcttgccgtccttctcggtgatccgcaccggggggtagctgaagcccacggcc
gccagctcctcctcggcctgtctttcgtcctcgctgtcctggctgacgtcctgcaggaccacatgcttggtcttgcggggtttcttcttgggcg
gcagcggcggcggagatgttggagatggcgagggggagcgcgagttctcgctcaccactactatctcttcctcttcttggtccgaggccac
gcggcggtaggtatgtctcttcgggggcagaggcggaggcgacgggctctcgccgccgcgacttggcggatggctggcagagcccctt
ccgcgttcgggggtgcgctcccggcggcgctctgactgacttcctccgcggccggccattgtgttctcctagggaggaacaacaagcatg
gagactcagccatcgccaacctcgccatctgcccccaccgccgacgagaagcagcagcagcagaatgaaagcttaaccgccccgccgc
ccagccccgccacctccgacgcggccgtcccagacatgcaagagatggaggaatccatcgagattgacctgggctatgtgacgcccgc
ggagcacgaggaggagctggcagtgcgcttttcacaagaagagatacaccaagaacagccagagcaggaagcagagaatgagcaga
gtcaggctgggctcgagcatgacggcgactacctccacctgagcgggggggaggacgcgctcatcaagcatctggcccggcaggcca
ccatcgtcaaggatgcgctgctcgaccgcaccgaggtgcccctcagcgtggaggagctcagccgcgcctacgagttgaacctcttctcgc
cgcgcgtgccccccaagcgccagcccaatggcacctgcgagcccaacccgcgcctcaacttctacccggtcttcgcggtgcccgaggc
cctggccacctaccacatctttttcaagaaccaaaagatccccgtctcctgccgcgccaaccgcacccgcgccgacgcccttttcaacctgg
gtcccggcgcccgcctacctgatatcgcctccttggaagaggttcccaagatcttcgagggtctgggcagcgacgagactcgggccgcg
aacgctctgcaaggagaaggaggagagcatgagcaccacagcgccctggtcgagttggaaggcgacaacgcgcggctggcggtgctc
aaacgcacggtcgagctgacccatttcgcctacccggctctgaacctgccccccaaagtcatgagcgcggtcatggaccaggtgctcatc
aagcgcgcgtcgcccatctccgaggacgagggcatgcaagactccgaggagggcaagcccgtggtcagcgacgagcagctggcccg
gtggctgggtcctaatgctagtccccagagtttggaagagcggcgcaaactcatgatggccgtggtcctggtgaccgtggagctggagtg
cctgcgccgcttcttcgccgacgcggagaccctgcgcaaggtcgaggagaacctgcactacctcttcaggcacgggttcgtgcgccagg
cctgcaagatctccaacgtggagctgaccaacctggtctcctacatgggcatcttgcacgagaaccgcctggggcagaacgtgctgcaca
ccaccctgcgcggggaggcccggcgcgactacatccgcgactgcgtctacctctacctctgccacacctggcagacgggcatgggcgt
gtggcagcagtgtctggaggagcagaacctgaaagagctctgcaagctcctgcagaagaacctcaagggtctgtggaccgggttcgacg
agcgcaccaccgcctcggacctggccgacctcattttccccgagcgcctcaggctgacgctgcgcaacggcctgcccgactttatgagcc
aaagcatgttgcaaaactttcgctctttcatcctcgaacgctccggaatcctgcccgccacctgctccgcgctgccctcggacttcgtgccgc
tgaccttccgcgagtgccccccgccgctgtggagccactgctacctgctgcgcctggccaactacctggcctaccactcggacgtgatcg
aggacgtcagcggcgagggcctgctcgagtgccactgccgctgcaacctctgcacgccgcaccgctccctggcctgcaacccccagct
gctgagcgagacccagatcatcggcaccttcgagttgcaagggcccagcgaaggcgagggttcagccgccaaggggggtctgaaactc
accccggggctgtggacctcggcctacttgcgcaagttcgtgcccgaggactaccatcccttcgagatcaggttctacgaggaccaatccc
atccgcccaaggccgagctgtcggcctgcgtcatcacccagggggcgatcctggcccaattgcaagccatccagaaatcccgccaagaa
ttcttgctgaaaaagggccgcggggtctacctcgacccccagaccggtgaggagctcaaccccggcttcccccaggatgccccgaggaa
acaagaagctgaaagtggagctgccgcccgtggaggatttggaggaagactgggagaacagcagtcaggcagaggaggaggagatg
gaggaagactgggacagcactcaggcagaggaggacagcctgcaagacagtctggaggaagacgaggaggaggcagaggaggag
gtggaagaagcagccgccgccagaccgtcgtcctcggcgggggagaaagcaagcagcacggataccatctccgctccgggtcggggt
cccgctcgaccacacagtagatgggacgagaccggacgattcccgaaccccaccacccagaccggtaagaaggagcggcagggatac
aagtcctggcgggggcacaaaaacgccatcgtctcctgcttgcaggcctgcgggggcaacatctccttcacccggcgctacctgctcttcc
accgcggggtgaactttccccgcaacatcttgcattactaccgtcacctccacagcccctactacttccaagaagaggcagcagcagcaga
aaaagaccagcagaaaaccagcagctagaaaatccacagcggcggcagcaggtggactgaggatcgcggcgaacgagccggcgca
aacccgggagctgaggaaccggatctttcccaccctctatgccatcttccagcagagtcgggggcaggagcaggaactgaaagtcaaga
accgttctctgcgctcgctcacccgcagttgtctgtatcacaagagcgaagaccaacttcagcgcactctcgaggacgccgaggctctcttc
aacaagtactgcgcgctcactcttaaagagtagcccgcgcccgcccagtcgcagaaaaaggcgggaattacgtcacctgtgcccttcgcc
ctagccgcctccacccatcatcatgagcaaagagattcccacgccttacatgtggagctaccagccccagatgggcctggccgccggtgc
cgcccaggactactccacccgcatgaattggctcagcgccgggcccgcgatgatctcacgggtgaatgacatccgcgcccaccgaaacc
agatactcctagaacagtcagcgctcaccgccacgccccgcaatcacctcaatccgcgtaattggcccgccgccctggtgtaccaggaaa
ttccccagcccacgaccgtactacttccgcgagacgcccaggccgaagtccagctgactaactcaggtgtccagctggcgggcggcgcc
accctgtgtcgtcaccgccccgctcagggtataaagcggctggtgatccggggcagaggcacacagctcaacgacgaggtggtgagctc
ttcgctgggtctgcgacctgacggagtcttccaactcgccggatcggggagatcttccttcacgcctcgtcaggccgtcctgactttggaga
gttcgtcctcgcagccccgctcgggtggcatcggcactctccagttcgtggaggagttcactccctcggtctacttcaaccccttctccggct
cccccggccactacccggacgagttcatcccgaacttcgacgccatcagcgagtcggtggacggctacgattgaatgtcccatggtggcg
cagctgacctagctcggcttcgacacctggaccactgccgccgcttccgctgcttcgctcgggatctcgccgagtttgcctactttgagctgc
ccgaggagcaccctcagggcccggcccacggagtgcggatcgtcgtcgaagggggcctcgactcccacctgcttcggatcttcagcca
gcgtccgatcctggtcgagcgcgagcaaggacagacccttctgactctgtactgcatctgcaaccaccccggcctgcatgaaagtctttgtt
gtctgctgtgtactgagtataataaaagctgagatcagcgactactccggacttccgtgtgtTTAAACtcacccccttatccagtgaaata
aagatcatattgatgatgattttacagaaataaaaaataatcatttgatttgaaataaagatacaatcatattgatgatttgagtttaacaaaaaaat
aaagaatcacttacttgaaatctgataccaggtctctgtccatgttttctgccaacaccacttcactcccctcttcccagctctggtactgcaggc
cccggcgggctgcaaacttcctccacacgctgaaggggatgtcaaattcctcctgtccctcaatcttcattttatcttctatcagatgtccaaaa
agcgcgtccgggtggatgatgacttcgaccccgtctacccctacgatgcagacaacgcaccgaccgtgcccttcatcaacccccccttcgt
ctcttcagatggattccaagagaagcccctgggggtgttgtccctgcgactggccgaccccgtcaccaccaagaacggggaaatcaccct
caagctgggagagggggtggacctcgattcctcgggaaaactcatctccaacacggccaccaaggccgccgcccctctcagtttttccaa
caacaccatttcccttaacatggatcaccccttttacactaaagatggaaaattatccttacaagtttctccaccattaaatatactgagaacaag
cattctaaacacactagctttaggttttggatcaggtttaggactccgtggctctgccttggcagtacagttagtctctccacttacatttgatact
gatggaaacataaagcttaccttagacagaggtttgcatgttacaacaggagatgcaattgaaagcaacataagctgggctaaaggtttaaa
atttgaagatggagccatagcaaccaacattggaaatgggttagagtttggaagcagtagtacagaaacaggtgttgatgatgcttacccaat
ccaagttaaacttggatctggccttagctttgacagtacaggagccataatggctggtaacaaagaagacgataaactcactttgtggacaac
acctgatccatcaccaaactgtcaaatactcgcagaaaatgatgcaaaactaacactttgcttgactaaatgtggtagtcaaatactggccact
gtgtcagtcttagttgtaggaagtggaaacctaaaccccattactggcaccgtaagcagtgctcaggtgtttctacgttttgatgcaaacggtg
ttcttttaacagaacattctacactaaaaaaatactgggggtataggcagggagatagcatagatggcactccatataccaatgctgtaggatt
catgcccaatttaaaagcttatccaaagtcacaaagttctactactaaaaataatatagtagggcaagtatacatgaatggagatgtttcaaaac
ctatgcttctcactataaccctcaatggtactgatgacagcaacagtacatattcaatgtcattttcatacacctggactaatggaagctatgttg
gagcaacatttggggctaactcttataccttctcatacatcgcccaagaatgaacactgtatcccaccctgcatgccaacccttcccacccca
ctctgtggaacaaactctgaaacacaaaataaaataaagttcaagtgttttattgattcaacagttttacaggattcgagcagttatttttcctcca
ccctcccaggacatggaatacaccaccctctccccccgcacagccttgaacatctgaatgccattggtgatggacatgcttttggtctccacg
ttccacacagtttcagagcgagccagtctcgggtcggtcagggagatgaaaccctccgggcactcccgcatctgcacctcacagctcaac
agctgaggattgtcctcggtggtcgggatcacggttatctggaagaagcagaagagcggcggtgggaatcatagtccgcgaacgggatc
ggccggtggtgtcgcatcaggccccgcagcagtcgctgccgccgccgctccgtcaagctgctgctcagggggtccgggtccagggact
ccctcagcatgatgcccacggccctcagcatcagtcgtctggtgcggcgggcgcagcagcgcatgcggatctcgctcaggtcgctgcag
tacgtgcaacacagaaccaccaggttgttcaacagtccatagttcaacacgctccagccgaaactcatcgcgggaaggatgctacccacgt
ggccgtcgtaccagatcctcaggtaaatcaagtggtgccccctccagaacacgctgcccacgtacatgatctccttgggcatgtggcggttc
accacctcccggtaccacatcaccctctggttgaacatgcagccccggatgatcctgcggaaccacagggccagcaccgccccgcccgc
catgcagcgaagagaccccgggtcccggcaatggcaatggaggacccaccgctcgtacccgtggatcatctgggagctgaacaagtcta
tgttggcacagcacaggcatatgctcatgcatctcttcagcactctcaactcctcgggggtcaaaaccatatcccagggcacggggaactct
tgcaggacagcgaaccccgcagaacagggcaatcctcgcacagaacttacattgtgcatggacagggtatcgcaatcaggcagcaccg
ggtgatcctccaccagagaagcgcgggtctcggtctcctcacagcgtggtaagggggccggccgatacgggtgatggcgggacgcgg
ctgatcgtgttcgcgaccgtgtcatgatgcagttgctttcggacattttcgtacttgctgtagcagaacctggtccgggcgctgcacaccgatc
gccggcggcggtctcggcgcttggaacgctcggtgttgaaattgtaaaacagccactctctcagaccgtgcagcagatctagggcctcag
gagtgatgaagatcccatcatgcctgatggctctgatcacatcgaccaccgtggaatgggccagacccagccagatgatgcaattttgttgg
gtttcggtgacggcgggggagggaagaacaggaagaaccatgattaacttttaatccaaacggtctcggagtacttcaaaatgaagatcgc
ggagatggcacctctcgcccccgctgtgttggtggaaaataacagccaggtcaaaggtgatacggttctcgagatgttccacggtggcttc
cagcaaagcctccacgcgcacatccagaaacaagacaatagcgaaagcgggagggttctctaattcctcaatcatcatgttacactcctgc
accatccccagataattttcatttttccagccttgaatgattcgaactagttcCtgaggtaaatccaagccagccatgataaagagctcgcgca
gagcgccctccaccggcattcttaagcacaccctcataattccaagatattctgctcctggttcacctgcagcagattgacaagcggaatatc
aaaatctctgccgcgatccctgagctcctccctcagcaataactgtaagtactctttcatatcctctccgaaatttttagccataggaccaccag
gaataagattagggcaagccacagtacagataaaccgaagtcctccccagtgagcattgccaaatgcaagactgctataagcatgctggct
agacccggtgatatcttccagataactggacagaaaatcgcccaggcaatttttaagaaaatcaacaaaagaaaaatcctccaggtggacgt
ttagagcctcgggaacaacgatgaagtaaatgcaagcggtgcgttccagcatggttagttagctgatctgtagaaaaaacaaaaatgaacat
taaaccatgctagcctggcgaacaggtgggtaaatcgttctctccagcaccaggcaggccacggggtctccggcgcgaccctcgtaaaaa
ttgtcgctatgattgaaaaccatcacagagagacgttcccggtggccggcgtgaatgattcgacaagatgaatacacccccggaacattgg
cgtccgcgagtgaaaaaaagcgcccgaggaagcaataaggcactacaatgctcagtctcaagtccagcaaagcgatgccatgcggatga
agcacaaaattctcaggtgcgtacaaaatgtaattactcccctcctgcacaggcagcaaagcccccgatccctccaggtacacatacaaag
cctcagcgtccatagcttaccgagcagcagcacacaacaggcgcaagagtcagagaaaggctgagctctaacctgtccacccgctctctg
ctcaatatatagcccagatctacactgacgtaaaggccaaagtctaaaaatacccgccaaataatcacacacgcccagcacacgcccaga
aaccggtgacacactcaaaaaaatacgcgcacttcctcaaacgcccaaaactgccgtcatttccgggttcccacgctacgtcatcaaaaca
cgactttcaaattccgtcgaccgttaaaaacgtcacccgccccgcccctaacggtcgcccgtctctcagccaatcagcgccccgcatcccc
aaattcaaacacctcatttgcatattaacgcgcacaaaaagtttgaggtatattattgatgatgg.
Plasmid 1424 ORF (RNA)

SEQ ID NO: 87

auggcuagcaccccuggaacccagagccccuucuuccuucugcugcugcugaccgugcugacugucgugacaggcucuggcc
acgccagcucuacaccuggcggcgagaaagagacaagcgccacccagagaagcagcgugccaagcagcaccgagaagaacgcc
guguccaugaccagcuccgugcugagcagccacucuccuggcagcggcagcagcacaacacagggccaggaugugacacugg
ccccugccacagaaccugccucuggaucugccgccaccuggggacaggacgugacaagcgugccagugaccagaccugcccug
ggcucuacaacacccccugcccacgaugugaccagcgccccugauaacaagccugccccuggaagcacagccccuccagcucau
ggcgugaccucugccccagauaccagaccagccccaggaucuacagccccacccgcacacggcgugacaagugccccugacaca
agacccgcuccaggcucuacugcuccuccugcccauggcgugacaagcgcucccgauacaaggccagcuccuggcuccacagc
accaccagcacauggcgugacaucagcucccgacacuagaccugcucccggaucaaccgcuccaccagcucacggcgugacca
gcgcaccugauaccagaccugcucugggaagcaccgccccucccgugcacaaugugacaucugcuuccggcagcgccagcggc
ucugccucuacacuggugcacaacggcaccagcgccagagccacaacaaccccagccagcaagagcacccccuucagcaucccu
agccaccacagcgacaccccuaccacacuggccagccacuccaccaagaccgaugccucuagcacccaccacuccagcgugccc
ccucugaccagcagcaaccacagcacaagcccccagcugucuaccggcgucucauucuucuuucuguccuuccacaucagcaa
ccugcaguucaacagcagccuggaagaucccagcaccgacuacuaccaggaacugcagcgggauaucagcgagauguuccugc
aaaucuacaagcagggcggcuuccugggccugagcaacaucaaguucagacccggcagcgugguggugcagcugacccuggc
uuuccgggaaggcaccaucaacgugcacgacguggaaacccaguucaaccaguacaagaccgaggccgccagccgguacaacc
ugaccaucuccgauguguccguguccgacgugcccuucccauucucugcccagucuggcgcaggcgugccaggauggggaau
ugcucugcuggugcucgugugcgugcugguggcccuggccaucguguaucugauugcccuggccgugugccagugccggc
ggaagaauuacggccagcuggacaucuuccccgccagagacaccuaccaccccaugagcgaguaccccacauaccacacccacg
gcagauacgugccacccagcuccaccgacagaucccccuacgagaaagugucugccggcaacggcggcagcucccugagcuac
acaaauccugccguggccgcugccuccgccaaccugggauccggcacaauccugucugagggcgccaccaacuucagccugcu
gaaacuggccggcgacguggaacugaacccuggcccuggagcugccccggagccggagaggacccccguuggccagggaucg
ugggcccauccgggacgcaccaggggaccauccgacaggggauucuguguggugucaccggccaggccagcagaagaggcaa
ccagccucgagggagcguugucuggaaccagacauucccacccgucggugggccggcagcaccacgcgggaccaccguccacu
uccagaccgccacggccaugggacaccccuugcccgccuguguaugccgagacuaaacacuuccuguacucauccggagacaa
ggaacagcuucggccguccuuccuccugucgucgcucagaccgagccugaccggagcacgcagauugguggaaacuaucuuc
cuugggucacguccguggaugccagguaccccacggcgccucccgcgccucccacagagauacuggcagaugcggccucugu
uccuggaauugcugggaaaccacgcucagugcccguacggaguccugcucaagacucacugcccucugagggcggcggucac
uccggcggccggagugugcgcacgggagaagccccagggaagcguggcagcuccggaagaggaggacaccgauccgcgccgc
cucgugcaacuucugcgccagcacuccucgcccuggcaagucuacggguucguccgcgccugccugcgccgccuggugccgc
cugggcucugggguucccggcauaacgagcgccgcuuccugagaaauacuaagaaguuuaucucacuuggaaaacaugccaa
guugucgcugcaagaacucacguggaagaugucaguccgcgauugcgccuggcugcgccgcucgccgggcgucgggugugu
uccagcugcagaacaccgccugagagaagaaauucuggccaaauuucugcauuggcugaugucaguguacguggucgagcug
cugcgcuccuuuuucuacgucacugagacuaccuuucaaaagaaccgccuguucuucuaccgcaaaucuguguggagcaagc
ugcagucaaucggcauucgccagcaucugaagagggugcagcugcgggaacuuuccgaggcagaaguccgccagcaccggga
ggcccggccggcgcuucucacgucgcgucugagauucaucccaaagcccgacgggcugaggccuaucgucaacauggauuac
gucgugggcgcucgcaccuuucgccgugaaaagcgggccgaacgcuugaccucacgggugaaggcccucuucuccgugcuga
acuacgagagagcaagacggccuggccugcugggagcuucggugcugggacuggacgauauccaccgggcuuggcggaccu
uuguucuccgggugagagcccaagacccuccgccggaacuguacuucgugaagguggcgaucaccggagccuaugauacuau
uccgcaagaucgacucaccgaagucaucgccucgaucaucaaaccgcagaacacuuacugcgucaggcgguacgccguggucc
agaaggccgcgcauggccacgugagaaaggcguucaagucgcacguguccacucucaccgaccuccagccuuacaugaggcaa
uucguugcgcauuugcaagagacuucgccccugagagaugcgguggucaucgagcagagcuccagccugaacgaagcgagca
gcggucuguuugacguguuccuccgcuucaugugucaucacgcggugcgaaucaggggaaaaucauacgugcagugccagg
gaaucccacaaggcagcauucugucgacucucuuguguucccuuugcuacggcgauauggaaaacaagcuguucgcugggau
cagacgggacggguugcugcucagacugguggacgacuuccugcuggugacuccgcaccucacucacgccaaaaccuuucuc
cgcacucuggugaggggagugccagaauacggcuguguggucaaucuccggaaaacuguggugaauuucccugucgaggau
gaggcacucggaggaaccgcauuuguccaaaugccagcacauggccuguucccauggugcggucugcugcuggacacccgaa
cucuugaagugcaguccgacuacuccagcuaugcccggacgagcauccgcgccagccucacuuucaaucgcggcuuuaaggc
cggacgaaacaugcgcagaaagcuuuucggaguccuccggcuuaaaugccauucgcucuuucucgaucuccaagucaauucg
cugcagaccgugugcacgaacaucuacaagauccugcugcuccaagccuaccgguuccacgcuugcgugcuucagcugccgu
uucaccaacagguguggaagaacccgaccuucuuucugcgggucauuagcgauacugccucccuguguuacucaauccucaa
ggcaaagaacgccggaaugucgcugggugcgaaaggagccgcgggaccucuuccuagcgaagcggugcaguggcucugccac
caggcuuuccuccugaagcugaccaggcacagagugaccuacgucccgcugcugggcucgcugcgcacugcacagacccagc
ugucuagaaaacuccccggcaccacccugaccgcucuggaagccgccgccaacccagcauugccgucagauuucaagaccauc
uuggacggauccggccagugcaccaauuacgcccugcugaagcuggccggcgacguggaaucuaacccuggcccugaaucgc
caagcgcacccccucaucgguggugcaucccuuggcaacgccuccuccugaccgccucacugcugacuuucuggaacccgccg
accaccgcaaagcugaccauugagagcacucccuucaacguggcugaggggaaggaggugcugcuccuggugcacaaucugc
cccagcaccuguucggguacuccugguacaagggagaacgcguggacgggaaccggcagaucauaggcuacgucaucggaac
ccagcaggccacacccgguccagcguacagcggccgggagauuaucuacccgaacgccucccugcugauccaaaacaucaucc
agaacgacaccgguuucuacacucugcacgugauuaagucagaucuggucaacgaagaggccaccggccaauucagggugua
ccccgaacucccuaagccguucaucaccucgaacaacagcaacccggucgaggaugaagaugcgguggccuugacgugcgaac
cugagauccagaacaccaccuacuuguggugggugaacaaucagagccugccagucuccccacgacuccagcugucgaacgac
aacaggacccugacuuugcuguccgugacucggaacgacgugggcccuuaugaaugcgguauccagaacaagcuguccgugg
accacagcgacccugugauccugaacguccuuuacgggccggacgaccccaccauuuccccgucguacacuuacuaccggccg
ggcgugaaccugucccugucgugccacgcugccuccaauccgccggcccaguacuccuggcucaucgacggaaacauccagca
gcacacccaagaacuguucaucuccaacauuaccgagaaaaacucgggacuuuacaccugucaagccaacaauuccgccagcg
gccacucccgcaccacugucaaaacuaucacuguguccgccgaacucccgaagcccagcaucagcuccaacaacucgaagcccg
uggaggauaaggacgcugucgcguucaccugugaaccagaggcacagaauaccaccuaccuuuggugggucaacggacaguc
ccugccugucucaccgagacugcagcugucaaacgggaauaggacucugaccuuguuuaacgucacccggaacgacgcccgg
gccuacgugugcggcauccagaacuccgugagcgcaaaccggucugacccagugacccuggaugugcuguacggccccgaca
cuccgaucauuucaccccccgauucauccuaccuguccggcgcuaaccucaaccucucaugccacuccgcauccaaccccagcc
cgcaauauucguggcgcauuaacggaauuccucagcaacauacccagguccuguucauugcgaagaucaccccuaacaacaac
ggaaccuacgccugcuuugugucaaaccuggccacugguagaaacaacuccaucgugaaguccauuaccgugucggcguccg
gaacuuccccgggccugagcgccggcgccaccgugggaauuaugaucggcgugcucgugggaguggcccugauc.
Plasmid 1425 ORF (RNA)

SEQ ID NO: 88

auggcuagcgaaucgccaagcgcacccccucaucgguggugcaucccuuggcaacgccuccuccugaccgccucacugcugac
uuucuggaacccgccgaccaccgcaaagcugaccauugagagcacucccuucaacguggcugaggggaaggaggugcugcuc
cuggugcacaaucugccccagcaccuguucggguacuccugguacaagggagaacgcguggacgggaaccggcagaucauag
gcuacgucaucggaacccagcaggccacacccgguccagcguacagcggccgggagauuaucuacccgaacgccucccugcug
auccaaaacaucauccagaacgacaccgguuucuacacucugcacgugauuaagucagaucuggucaacgaagaggccaccgg
ccaauucaggguguaccccgaacucccuaagccguucaucaccucgaacaacagcaacccggucgaggaugaagaugcggugg
ccuugacgugcgaaccugagauccagaacaccaccuacuuguggugggugaacaaucagagccugccagucuccccacgacuc
cagcugucgaacgacaacaggacccugacuuugcuguccgugacucggaacgacgugggcccuuaugaaugcgguauccaga
acaagcuguccguggaccacagcgacccugugauccugaacguccuuuacgggccggacgaccccaccauuuccccgucguac
acuuacuaccggccgggcgugaaccugucccugucgugccacgcugccuccaauccgccggcccaguacuccuggcucaucg
acggaaacauccagcagcacacccaagaacuguucaucuccaacauuaccgagaaaaacucgggacuuuacaccugucaagcca
acaauuccgccagcggccacucccgcaccacugucaaaacuaucacuguguccgccgaacucccgaagcccagcaucagcucca
acaacucgaagcccguggaggauaaggacgcugucgcguucaccugugaaccagaggcacagaauaccaccuaccuuuggug
ggucaacggacagucccugccugucucaccgagacugcagcugucaaacgggaauaggacucugaccuuguuuaacgucacc
cggaacgacgcccgggccuacgugugcggcauccagaacuccgugagcgcaaaccggucugacccagugacccuggaugugc
uguacggccccgacacuccgaucauuucaccccccgauucauccuaccuguccggcgcuaaccucaaccucucaugccacucc
gcauccaaccccagcccgcaauauucguggcgcauuaacggaauuccucagcaacauacccagguccuguucauugcgaagau
caccccuaacaacaacggaaccuacgccugcuuugugucaaaccuggccacugguagaaacaacuccaucgugaaguccauua
ccgugucggcguccggaacuuccccgggccugagcgccggcgccaccgugggaauuaugaucggcgugcucgugggagugg
cccugaucggauccggcgagggcagaggcagccugcugacauguggcgacguggaagagaacccuggccccaccccuggaac
ccagagccccuucuuccuucugcugcugcugaccgugcugacugucgugacaggcucuggccacgccagcucuacaccuggc
ggcgagaaagagacaagcgccacccagagaagcagcgugccaagcagcaccgagaagaacgccguguccaugaccagcuccgu
gcugagcagccacucuccuggcagcggcagcagcacaacacagggccaggaugugacacuggccccugccacagaaccugccu
cuggaucugccgccaccuggggacaggacgugacaagcgugccagugaccagaccugcccugggcucuacaacacccccugcc
cacgaugugaccagcgccccugauaacaagccugccccuggaagcacagccccuccagcucauggcgugaccucugccccaga
uaccagaccagccccaggaucuacagccccacccgcacacggcgugacaagugccccugacacaagacccgcuccaggcucuac
ugcuccuccugcccauggcgugacaagcgcucccgauacaaggccagcuccuggcuccacagcaccaccagcacauggcguga
caucagcucccgacacuagaccugcucccggaucaaccgcuccaccagcucacggcgugaccagcgcaccugauaccagaccu
gcucugggaagcaccgccccucccgugcacaaugugacaucugcuuccggcagcgccagcggcucugccucuacacuggugc
acaacggcaccagcgccagagccacaacaaccccagccagcaagagcacccccuucagcaucccuagccaccacagcgacacccc
uaccacacuggccagccacuccaccaagaccgaugccucuagcacccaccacuccagcgugcccccucugaccagcagcaacca
cagcacaagcccccagcugucuaccggcgucucauucuucuuucuguccuuccacaucagcaaccugcaguucaacagcagcc
uggaagaucccagcaccgacuacuaccaggaacugcagcgggauaucagcgagauguuccugcaaaucuacaagcagggcggc
uuccugggccugagcaacaucaaguucagacccggcagcgugguggugcagcugacccuggcuuuccgggaaggcaccauca
acgugcacgacguggaaacccaguucaaccaguacaagaccgaggccgccagccgguacaaccugaccaucuccgaugugucc
guguccgacgugcccuucccauucucugcccagucuggcgcaggcgugccaggauggggaauugcucugcuggugcucgug
ugcgugcugguggcccuggccaucguguaucugauugcccuggccgugugccagugccggcggaagaauuacggccagcug
gacaucuuccccgccagagacaccuaccaccccaugagcgaguaccccacauaccacacccacggcagauacgugccacccagc
uccaccgacagaucccccuacgagaaagugucugccggcaacggcggcagcucccugagcuacacaaauccugccguggccgc
ugccuccgccaaccugggauccggcacaauccugucugagggcgccaccaacuucagccugcugaaacuggccggcgacgug
gaacugaacccuggcccuggagcugccccggagccggagaggacccccguuggccagggaucgugggcccauccgggacgca
ccaggggaccauccgacaggggauucuguguggugucaccggccaggccagcagaagaggcaaccagccucgagggagcguu
gucuggaaccagacauucccacccgucggugggccggcagcaccacgcgggaccaccguccacuuccagaccgccacggccau
gggacaccccuugcccgccuguguaugccgagacuaaacacuuccuguacucauccggagacaaggaacagcuucggccgucc
uuccuccugucgucgcucagaccgagccugaccggagcacgcagauugguggaaacuaucuuccuugggucacguccgugga
ugccagguaccccacggcgccucccgcgccucccacagagauacuggcagaugcggccucuguuccuggaauugcugggaaa
ccacgcucagugcccguacggaguccugcucaagacucacugcccucugagggcggcggucacuccggcggccggagugugc
gcacgggagaagccccagggaagcguggcagcuccggaagaggaggacaccgauccgcgccgccucgugcaacuucugcgcc
agcacuccucgcccuggcaagucuacggguucguccgcgccugccugcgccgccuggugccgccugggcucugggguucccg
gcauaacgagcgccgcuuccugagaaauacuaagaaguuuaucucacuuggaaaacaugccaaguugucgcugcaagaacuca
cguggaagaugucaguccgcgauugcgccuggcugcgccgcucgccgggcgucggguguguuccagcugcagaacaccgcc
ugagagaagaaauucuggccaaauuucugcauuggcugaugucaguguacguggucgagcugcugcgcuccuuuuucuacg
ucacugagacuaccuuucaaaagaaccgccuguucuucuaccgcaaaucuguguggagcaagcugcagucaaucggcauucg
ccagcaucugaagagggugcagcugcgggaacuuuccgaggcagaaguccgccagcaccgggaggcccggccggcgcuucuc
acgucgcgucugagauucaucccaaagcccgacgggcugaggccuaucgucaacauggauuacgucgugggcgcucgcaccu
uucgccgugaaaagcgggccgaacgcuugaccucacgggugaaggcccucuucuccgugcugaacuacgagagagcaagacg
gccuggccugcugggagcuucggugcugggacuggacgauauccaccgggcuuggcggaccuuuguucuccgggugagagc
ccaagacccuccgccggaacuguacuucgugaagguggcgaucaccggagccuaugauacuauuccgcaagaucgacucaccg
aagucaucgccucgaucaucaaaccgcagaacacuuacugcgucaggcgguacgccgugguccagaaggccgcgcauggccac
gugagaaaggcguucaagucgcacguguccacucucaccgaccuccagccuuacaugaggcaauucguugcgcauuugcaag
agacuucgccccugagagaugcgguggucaucgagcagagcuccagccugaacgaagcgagcagcggucuguuugacguguu
ccuccgcuucaugugucaucacgcggugcgaaucaggggaaaaucauacgugcagugccagggaaucccacaaggcagcauu
cugucgacucucuuguguucccuuugcuacggcgauauggaaaacaagcuguucgcugggaucagacgggacggguugcug
cucagacugguggacgacuuccugcuggugacuccgcaccucacucacgccaaaaccuuucuccgcacucuggugaggggag
ugccagaauacggcuguguggucaaucuccggaaaacuguggugaauuucccugucgaggaugaggcacucggaggaaccgc
auuuguccaaaugccagcacauggccuguucccauggugcggucugcugcuggacacccgaacucuugaagugcaguccgac
uacuccagcuaugcccggacgagcauccgcgccagccucacuuucaaucgcggcuuuaaggccggacgaaacaugcgcagaaa
gcuuuucggaguccuccggcuuaaaugccauucgcucuuucucgaucuccaagucaauucgcugcagaccgugugcacgaac
aucuacaagauccugcugcuccaagccuaccgguuccacgcuugcgugcuucagcugccguuucaccaacagguguggaaga
acccgaccuucuuucugcgggucauuagcgauacugccucccuguguuacucaauccucaaggcaaagaacgccggaauguc
gcugggugcgaaaggagccgcgggaccucuuccuagcgaagcggugcaguggcucugccaccaggcuuuccuccugaagcug
accaggcacagagugaccuacgucccgcugcugggcucgcugcgcacugcacagacccagcugucuagaaaacuccccggcac
cacccugaccgcucuggaagccgccgccaacccagcauugccgucagauuucaagaccaucuuggac.
Plasmid 1426 ORF (RNA)

SEQ ID NO: 89

auggcuagcggagcugccccggagccggagaggacccccguuggccagggaucgugggcccauccgggacgcaccaggggac
cauccgacaggggauucuguguggugucaccggccaggccagcagaagaggcaaccagccucgagggagcguugucuggaac
cagacauucccacccgucggugggccggcagcaccacgcgggaccaccguccacuuccagaccgccacggccaugggacaccc
cuugcccgccuguguaugccgagacuaaacacuuccuguacucauccggagacaaggaacagcuucggccguccuuccuccu
gucgucgcucagaccgagccugaccggagcacgcagauugguggaaacuaucuuccuugggucacguccguggaugccaggu
accccacggcgccucccgcgccucccacagagauacuggcagaugcggccucuguuccuggaauugcugggaaaccacgcuca
gugcccguacggaguccugcucaagacucacugcccucugagggcggcggucacuccggcggccggagugugcgcacgggag
aagccccagggaagcguggcagcuccggaagaggaggacaccgauccgcgccgccucgugcaacuucugcgccagcacuccuc
gcccuggcaagucuacggguucguccgcgccugccugcgccgccuggugccgccugggcucugggguucccggcauaacga
gcgccgcuuccugagaaauacuaagaaguuuaucucacuuggaaaacaugccaaguugucgcugcaagaacucacguggaag
augucaguccgcgauugcgccuggcugcgccgcucgccgggcgucggguguguuccagcugcagaacaccgccugagagaag
aaauucuggccaaauuucugcauuggcugaugucaguguacguggucgagcugcugcgcuccuuuuucuacgucacugaga
cuaccuuucaaaagaaccgccuguucuucuaccgcaaaucuguguggagcaagcugcagucaaucggcauucgccagcaucu
gaagagggugcagcugcgggaacuuuccgaggcagaaguccgccagcaccgggaggcccggccggcgcuucucacgucgcgu
cugagauucaucccaaagcccgacgggcugaggccuaucgucaacauggauuacgucgugggcgcucgcaccuuucgccgug
aaaagcgggccgaacgcuugaccucacgggugaaggcccucuucuccgugcugaacuacgagagagcaagacggccuggccu
gcugggagcuucggugcugggacuggacgauauccaccgggcuuggcggaccuuuguucuccgggugagagcccaagaccc
uccgccggaacuguacuucgugaagguggcgaucaccggagccuaugauacuauuccgcaagaucgacucaccgaagucauc
gccucgaucaucaaaccgcagaacacuuacugcgucaggcgguacgccgugguccagaaggccgcgcauggccacgugagaaa
ggcguucaagucgcacguguccacucucaccgaccuccagccuuacaugaggcaauucguugcgcauuugcaagagacuucg
ccccugagagaugcgguggucaucgagcagagcuccagccugaacgaagcgagcagcggucuguuugacguguuccuccgcu
ucaugugucaucacgcggugcgaaucaggggaaaaucauacgugcagugccagggaaucccacaaggcagcauucugucgac
ucucuuguguucccuuugcuacggcgauauggaaaacaagcuguucgcugggaucagacgggacggguugcugcucagacu
gguggacgacuuccugcuggugacuccgcaccucacucacgccaaaaccuuucuccgcacucuggugaggggagugccagaa
uacggcuguguggucaaucuccggaaaacuguggugaauuucccugucgaggaugaggcacucggaggaaccgcauuuguc
caaaugccagcacauggccuguucccauggugcggucugcugcuggacacccgaacucuugaagugcaguccgacuacucca
gcuaugcccggacgagcauccgcgccagccucacuuucaaucgcggcuuuaaggccggacgaaacaugcgcagaaagcuuuu
cggaguccuccggcuuaaaugccauucgcucuuucucgaucuccaagucaauucgcugcagaccgugugcacgaacaucuac
aagauccugcugcuccaagccuaccgguuccacgcuugcgugcuucagcugccguuucaccaacagguguggaagaacccga
ccuucuuucugcgggucauuagcgauacugccucccuguguuacucaauccucaaggcaaagaacgccggaaugucgcuggg
ugcgaaaggagccgcgggaccucuuccuagcgaagcggugcaguggcucugccaccaggcuuuccuccugaagcugaccagg
cacagagugaccuacgucccgcugcugggcucgcugcgcacugcacagacccagcugucuagaaaacuccccggcaccacccu
gaccgcucuggaagccgccgccaacccagcauugccgucagauuucaagaccaucuuggacggauccggcacaauccugucug
agggcgccaccaacuucagccugcugaaacuggccggcgacguggaacugaacccuggcccuaccccuggaacccagagcccc
uucuuccuucugcugcugcugaccgugcugacugucgugacaggcucuggccacgccagcucuacaccuggcggcgagaaag
agacaagcgccacccagagaagcagcgugccaagcagcaccgagaagaacgccguguccaugaccagcuccgugcugagcagc
cacucuccuggcagcggcagcagcacaacacagggccaggaugugacacuggccccugccacagaaccugccucuggaucugc
cgccaccuggggacaggacgugacaagcgugccagugaccagaccugcccugggcucuacaacacccccugcccacgauguga
ccagcgccccugauaacaagccugccccuggaagcacagccccuccagcucauggcgugaccucugccccagauaccagacca
gccccaggaucuacagccccacccgcacacggcgugacaagugccccugacacaagacccgcuccaggcucuacugcuccucc
ugcccauggcgugacaagcgcucccgauacaaggccagcuccuggcuccacagcaccaccagcacauggcgugacaucagcuc
ccgacacuagaccugcucccggaucaaccgcuccaccagcucacggcgugaccagcgcaccugauaccagaccugcucuggga
agcaccgccccucccgugcacaaugugacaucugcuuccggcagcgccagcggcucugccucuacacuggugcacaacggcac
cagcgccagagccacaacaaccccagccagcaagagcacccccuucagcaucccuagccaccacagcgacaccccuaccacacug
gccagccacuccaccaagaccgaugccucuagcacccaccacuccagcgugcccccucugaccagcagcaaccacagcacaagc
ccccagcugucuaccggcgucucauucuucuuucuguccuuccacaucagcaaccugcaguucaacagcagccuggaagaucc
cagcaccgacuacuaccaggaacugcagcgggauaucagcgagauguuccugcaaaucuacaagcagggcggcuuccugggc
cugagcaacaucaaguucagacccggcagcgugguggugcagcugacccuggcuuuccgggaaggcaccaucaacgugcacg
acguggaaacccaguucaaccaguacaagaccgaggccgccagccgguacaaccugaccaucuccgauguguccguguccgac
gugcccuucccauucucugcccagucuggcgcaggcgugccaggauggggaauugcucugcuggugcucgugugcgugcug
guggcccuggccaucguguaucugauugcccuggccgugugccagugccggcggaagaauuacggccagcuggacaucuuc
cccgccagagacaccuaccaccccaugagcgaguaccccacauaccacacccacggcagauacgugccacccagcuccaccgac
agaucccccuacgagaaagugucugccggcaacggcggcagcucccugagcuacacaaauccugccguggccgcugccuccgc
caaccugggauccggcagaaucuucaacgcccacuacgccggcuacuucgccgaccugcugauccacgacaucgagacaaacc
cuggccccgaaucgccaagcgcacccccucaucgguggugcaucccuuggcaacgccuccuccugaccgccucacugcugacu
uucuggaacccgccgaccaccgcaaagcugaccauugagagcacucccuucaacguggcugaggggaaggaggugcugcucc
uggugcacaaucugccccagcaccuguucggguacuccugguacaagggagaacgcguggacgggaaccggcagaucauagg
cuacgucaucggaacccagcaggccacacccgguccagcguacagcggccgggagauuaucuacccgaacgccucccugcuga
uccaaaacaucauccagaacgacaccgguuucuacacucugcacgugauuaagucagaucuggucaacgaagaggccaccggc
caauucaggguguaccccgaacucccuaagccguucaucaccucgaacaacagcaacccggucgaggaugaagaugcgguggc
cuugacgugcgaaccugagauccagaacaccaccuacuuguggugggugaacaaucagagccugccagucuccccacgacucc
agcugucgaacgacaacaggacccugacuuugcuguccgugacucggaacgacgugggcccuuaugaaugcgguauccagaa
caagcuguccguggaccacagcgacccugugauccugaacguccuuuacgggccggacgaccccaccauuuccccgucguaca
cuuacuaccggccgggcgugaaccugucccugucgugccacgcugccuccaauccgccggcccaguacuccuggcucaucga
cggaaacauccagcagcacacccaagaacuguucaucuccaacauuaccgagaaaaacucgggacuuuacaccugucaagccaa
caauuccgccagcggccacucccgcaccacugucaaaacuaucacuguguccgccgaacucccgaagcccagcaucagcuccaa
caacucgaagcccguggaggauaaggacgcugucgcguucaccugugaaccagaggcacagaauaccaccuaccuuuggugg
gucaacggacagucccugccugucucaccgagacugcagcugucaaacgggaauaggacucugaccuuguuuaacgucaccc
ggaacgacgcccgggccuacgugugcggcauccagaacuccgugagcgcaaaccggucugacccagugacccuggaugugcu
guacggccccgacacuccgaucauuucaccccccgauucauccuaccuguccggcgcuaaccucaaccucucaugccacuccg
cauccaaccccagcccgcaauauucguggcgcauuaacggaauuccucagcaacauacccagguccuguucauugcgaagauc
accccuaacaacaacggaaccuacgccugcuuugugucaaaccuggccacugguagaaacaacuccaucgugaaguccauuac
cgugucggcguccggaacuuccccgggccugagcgccggcgccaccgugggaauuaugaucggcgugcucgugggaguggc
ccugauc.
Plasmid 1427 ORF (RNA)

SEQ ID NO: 90

auggcuagcggagcugccccggagccggagaggacccccguuggccagggaucgugggcccauccgggacgcaccaggggac
cauccgacaggggauucuguguggugucaccggccaggccagcagaagaggcaaccagccucgagggagcguugucuggaac
cagacauucccacccgucggugggccggcagcaccacgcgggaccaccguccacuuccagaccgccacggccaugggacaccc
cuugcccgccuguguaugccgagacuaaacacuuccuguacucauccggagacaaggaacagcuucggccguccuuccuccu
gucgucgcucagaccgagccugaccggagcacgcagauugguggaaacuaucuuccuugggucacguccguggaugccaggu
accccacggcgccucccgcgccucccacagagauacuggcagaugcggccucuguuccuggaauugcugggaaaccacgcuca
gugcccguacggaguccugcucaagacucacugcccucugagggcggcggucacuccggcggccggagugugcgcacgggag
aagccccagggaagcguggcagcuccggaagaggaggacaccgauccgcgccgccucgugcaacuucugcgccagcacuccuc
gcccuggcaagucuacggguucguccgcgccugccugcgccgccuggugccgccugggcucugggguucccggcauaacga
gcgccgcuuccugagaaauacuaagaaguuuaucucacuuggaaaacaugccaaguugucgcugcaagaacucacguggaag
augucaguccgcgauugcgccuggcugcgccgcucgccgggcgucggguguguuccagcugcagaacaccgccugagagaag
aaauucuggccaaauuucugcauuggcugaugucaguguacguggucgagcugcugcgcuccuuuuucuacgucacugaga
cuaccuuucaaaagaaccgccuguucuucuaccgcaaaucuguguggagcaagcugcagucaaucggcauucgccagcaucu
gaagagggugcagcugcgggaacuuuccgaggcagaaguccgccagcaccgggaggcccggccggcgcuucucacgucgcgu
cugagauucaucccaaagcccgacgggcugaggccuaucgucaacauggauuacgucgugggcgcucgcaccuuucgccgug
aaaagcgggccgaacgcuugaccucacgggugaaggcccucuucuccgugcugaacuacgagagagcaagacggccuggccu
gcugggagcuucggugcugggacuggacgauauccaccgggcuuggcggaccuuuguucuccgggugagagcccaagaccc
uccgccggaacuguacuucgugaagguggcgaucaccggagccuaugauacuauuccgcaagaucgacucaccgaagucauc
gccucgaucaucaaaccgcagaacacuuacugcgucaggcgguacgccgugguccagaaggccgcgcauggccacgugagaaa
ggcguucaagucgcacguguccacucucaccgaccuccagccuuacaugaggcaauucguugcgcauuugcaagagacuucg
ccccugagagaugcgguggucaucgagcagagcuccagccugaacgaagcgagcagcggucuguuugacguguuccuccgcu
ucaugugucaucacgcggugcgaaucaggggaaaaucauacgugcagugccagggaaucccacaaggcagcauucugucgac
ucucuuguguucccuuugcuacggcgauauggaaaacaagcuguucgcugggaucagacgggacggguugcugcucagacu
gguggacgacuuccugcuggugacuccgcaccucacucacgccaaaaccuuucuccgcacucuggugaggggagugccagaa
uacggcuguguggucaaucuccggaaaacuguggugaauuucccugucgaggaugaggcacucggaggaaccgcauuuguc
caaaugccagcacauggccuguucccauggugcggucugcugcuggacacccgaacucuugaagugcaguccgacuacucca
gcuaugcccggacgagcauccgcgccagccucacuuucaaucgcggcuuuaaggccggacgaaacaugcgcagaaagcuuuu
cggaguccuccggcuuaaaugccauucgcucuuucucgaucuccaagucaauucgcugcagaccgugugcacgaacaucuac
aagauccugcugcuccaagccuaccgguuccacgcuugcgugcuucagcugccguuucaccaacagguguggaagaacccga
ccuucuuucugcgggucauuagcgauacugccucccuguguuacucaauccucaaggcaaagaacgccggaaugucgcuggg
ugcgaaaggagccgcgggaccucuuccuagcgaagcggugcaguggcucugccaccaggcuuuccuccugaagcugaccagg
cacagagugaccuacgucccgcugcugggcucgcugcgcacugcacagacccagcugucuagaaaacuccccggcaccacccu
gaccgcucuggaagccgccgccaacccagcauugccgucagauuucaagaccaucuuggacggauccggccagugcaccaauu
acgcccugcugaagcuggccggcgacguggaaucuaacccuggcccugaaucgccaagcgcacccccucaucgguggugcau
cccuuggcaacgccuccuccugaccgccucacugcugacuuucuggaacccgccgaccaccgcaaagcugaccauugagagca
cucccuucaacguggcugaggggaaggaggugcugcuccuggugcacaaucugccccagcaccuguucggguacuccuggua
caagggagaacgcguggacgggaaccggcagaucauaggcuacgucaucggaacccagcaggccacacccgguccagcguaca
gcggccgggagauuaucuacccgaacgccucccugcugauccaaaacaucauccagaacgacaccgguuucuacacucugcac
gugauuaagucagaucuggucaacgaagaggccaccggccaauucaggguguaccccgaacucccuaagccguucaucaccuc
gaacaacagcaacccggucgaggaugaagaugcgguggccuugacgugcgaaccugagauccagaacaccaccuacuugugg
ugggugaacaaucagagccugccagucuccccacgacuccagcugucgaacgacaacaggacccugacuuugcuguccgugac
ucggaacgacgugggcccuuaugaaugcgguauccagaacaagcuguccguggaccacagcgacccugugauccugaacguc
cuuuacgggccggacgaccccaccauuuccccgucguacacuuacuaccggccgggcgugaaccugucccugucgugccacg
cugccuccaauccgccggcccaguacuccuggcucaucgacggaaacauccagcagcacacccaagaacuguucaucuccaaca
uuaccgagaaaaacucgggacuuuacaccugucaagccaacaauuccgccagcggccacucccgcaccacugucaaaacuauca
cuguguccgccgaacucccgaagcccagcaucagcuccaacaacucgaagcccguggaggauaaggacgcugucgcguucacc
ugugaaccagaggcacagaauaccaccuaccuuuggugggucaacggacagucccugccugucucaccgagacugcagcugu
caaacgggaauaggacucugaccuuguuuaacgucacccggaacgacgcccgggccuacgugugcggcauccagaacuccgu
gagcgcaaaccggucugacccagugacccuggaugugcuguacggccccgacacuccgaucauuucaccccccgauucauccu
accuguccggcgcuaaccucaaccucucaugccacuccgcauccaaccccagcccgcaauauucguggcgcauuaacggaauu
ccucagcaacauacccagguccuguucauugcgaagaucaccccuaacaacaacggaaccuacgccugcuuugugucaaaccu
ggccacugguagaaacaacuccaucgugaaguccauuaccgugucggcguccggaacuuccccgggccugagcgccggcgcc
accgugggaauuaugaucggcgugcucgugggaguggcccugaucggauccggcgagggcagaggcagccugcugacaugu
ggcgacguggaagagaacccuggccccaccccuggaacccagagccccuucuuccuucugcugcugcugaccgugcugacug
ucgugacaggcucuggccacgccagcucuacaccuggcggcgagaaagagacaagcgccacccagagaagcagcgugccaagc
agcaccgagaagaacgccguguccaugaccagcuccgugcugagcagccacucuccuggcagcggcagcagcacaacacaggg
ccaggaugugacacuggccccugccacagaaccugccucuggaucugccgccaccuggggacaggacgugacaagcgugcca
gugaccagaccugcccugggcucuacaacacccccugcccacgaugugaccagcgccccugauaacaagccugccccuggaag
cacagccccuccagcucauggcgugaccucugccccagauaccagaccagccccaggaucuacagccccacccgcacacggcgu
gacaagugccccugacacaagacccgcuccaggcucuacugcuccuccugcccauggcgugacaagcgcucccgauacaaggc
cagcuccuggcuccacagcaccaccagcacauggcgugacaucagcucccgacacuagaccugcucccggaucaaccgcuccac
cagcucacggcgugaccagcgcaccugauaccagaccugcucugggaagcaccgccccucccgugcacaaugugacaucugcu
uccggcagcgccagcggcucugccucuacacuggugcacaacggcaccagcgccagagccacaacaaccccagccagcaagagc
acccccuucagcaucccuagccaccacagcgacaccccuaccacacuggccagccacuccaccaagaccgaugccucuagcacc
caccacuccagcgugcccccucugaccagcagcaaccacagcacaagcccccagcugucuaccggcgucucauucuucuuucu
guccuuccacaucagcaaccugcaguucaacagcagccuggaagaucccagcaccgacuacuaccaggaacugcagcgggaua
ucagcgagauguuccugcaaaucuacaagcagggcggcuuccugggccugagcaacaucaaguucagacccggcagcguggu
ggugcagcugacccuggcuuuccgggaaggcaccaucaacgugcacgacguggaaacccaguucaaccaguacaagaccgagg
ccgccagccgguacaaccugaccaucuccgauguguccguguccgacgugcccuucccauucucugcccagucuggcgcagg
cgugccaggauggggaauugcucugcuggugcucgugugcgugcugguggcccuggccaucguguaucugauugcccugg
ccgugugccagugccggcggaagaauuacggccagcuggacaucuuccccgccagagacaccuaccaccccaugagcgaguac
cccacauaccacacccacggcagauacgugccacccagcuccaccgacagaucccccuacgagaaagugucugccggcaacggc
ggcagcucccugagcuacacaaauccugccguggccgcugccuccgccaaccug.
Plasmid 1428 ORF (RNA)

SEQ ID NO: 91

auggcuagcaccccuggaacccagagccccuucuuccuucugcugcugcugaccgugcugacugucgugacaggcucuggcc
acgccagcucuacaccuggcggcgagaaagagacaagcgccacccagagaagcagcgugccaagcagcaccgagaagaacgcc
guguccaugaccagcuccgugcugagcagccacucuccuggcagcggcagcagcacaacacagggccaggaugugacacugg
ccccugccacagaaccugccucuggaucugccgccaccuggggacaggacgugacaagcgugccagugaccagaccugcccug
ggcucuacaacacccccugcccacgaugugaccagcgccccugauaacaagccugccccuggaagcacagccccuccagcucau
ggcgugaccucugccccagauaccagaccagccccaggaucuacagccccacccgcacacggcgugacaagugccccugacaca
agacccgcuccaggcucuacugcuccuccugcccauggcgugacaagcgcucccgauacaaggccagcuccuggcuccacagc
accaccagcacauggcgugacaucagcucccgacacuagaccugcucccggaucaaccgcuccaccagcucacggcgugacca
gcgcaccugauaccagaccugcucugggaagcaccgccccucccgugcacaaugugacaucugcuuccggcagcgccagcggc
ucugccucuacacuggugcacaacggcaccagcgccagagccacaacaaccccagccagcaagagcacccccuucagcaucccu
agccaccacagcgacaccccuaccacacuggccagccacuccaccaagaccgaugccucuagcacccaccacuccagcgugccc
ccucugaccagcagcaaccacagcacaagcccccagcugucuaccggcgucucauucuucuuucuguccuuccacaucagcaa
ccugcaguucaacagcagccuggaagaucccagcaccgacuacuaccaggaacugcagcgggauaucagcgagauguuccugc
aaaucuacaagcagggcggcuuccugggccugagcaacaucaaguucagacccggcagcgugguggugcagcugacccuggc
uuuccgggaaggcaccaucaacgugcacgacguggaaacccaguucaaccaguacaagaccgaggccgccagccgguacaacc
ugaccaucuccgauguguccguguccgacgugcccuucccauucucugcccagucuggcgcaggcgugccaggauggggaau
ugcucugcuggugcucgugugcgugcugguggcccuggccaucguguaucugauugcccuggccgugugccagugccggc
ggaagaauuacggccagcuggacaucuuccccgccagagacaccuaccaccccaugagcgaguaccccacauaccacacccacg
gcagauacgugccacccagcuccaccgacagaucccccuacgagaaagugucugccggcaacggcggcagcucccugagcuac
acaaauccugccguggccgcugccuccgccaaccugggauccggcagaaucuucaacgcccacuacgccggcuacuucgccga
ccugcugauccacgacaucgagacaaacccuggccccaagcugaccauugagagcacucccuucaacguggcugaggggaagg
aggugcugcuccuggugcacaaucugccccagcaccuguucggguacuccugguacaagggagaacgcguggacgggaaccg
gcagaucauaggcuacgucaucggaacccagcaggccacacccgguccagcguacagcggccgggagauuaucuacccgaacg
ccucccugcugauccaaaacaucauccagaacgacaccgguuucuacacucugcacgugauuaagucagaucuggucaacgaa
gaggccaccggccaauucaggguguaccccgaacucccuaagccguucaucaccucgaacaacagcaacccggucgaggauga
agaugcgguggccuugacgugcgaaccugagauccagaacaccaccuacuuguggugggugaacaaucagagccugccaguc
uccccacgacuccagcugucgaacgacaacaggacccugacuuugcuguccgugacucggaacgacgugggcccuuaugaau
gcgguauccagaacaagcuguccguggaccacagcgacccugugauccugaacguccuuuacgggccggacgaccccaccauu
uccccgucguacacuuacuaccggccgggcgugaaccugucccugucgugccacgcugccuccaauccgccggcccaguacuc
cuggcucaucgacggaaacauccagcagcacacccaagaacuguucaucuccaacauuaccgagaaaaacucgggacuuuaca
ccugucaagccaacaauuccgccagcggccacucccgcaccacugucaaaacuaucacuguguccgccgaacucccgaagccca
gcaucagcuccaacaacucgaagcccguggaggauaaggacgcugucgcguucaccugugaaccagaggcacagaauaccacc
uaccuuuggugggucaacggacagucccugccugucucaccgagacugcagcugucaaacgggaauaggacucugaccuugu
uuaacgucacccggaacgacgcccgggccuacgugugcggcauccagaacuccgugagcgcaaaccggucugacccagugacc
cuggaugugcuguacggccccgacacuccgaucauuucaccccccgauucauccuaccuguccggcgcuaaccucaaccucuc
augccacuccgcauccaaccccagcccgcaauauucguggcgcauuaacggaauuccucagcaacauacccagguccuguuca
uugcgaagaucaccccuaacaacaacggaaccuacgccugcuuugugucaaaccuggccacugguagaaacaacuccaucgug
aaguccauuaccgugucggcguccggauccggcgagggcagaggcagccugcugacauguggcgacguggaagagaacccug
gccccggagcugccccggagccggagaggacccccguuggccagggaucgugggcccauccgggacgcaccaggggaccauc
cgacaggggauucuguguggugucaccggccaggccagcagaagaggcaaccagccucgagggagcguugucuggaaccaga
cauucccacccgucggugggccggcagcaccacgcgggaccaccguccacuuccagaccgccacggccaugggacaccccuug
cccgccuguguaugccgagacuaaacacuuccuguacucauccggagacaaggaacagcuucggccguccuuccuccugucg
ucgcucagaccgagccugaccggagcacgcagauugguggaaacuaucuuccuugggucacguccguggaugccagguaccc
cacggcgccucccgcgccucccacagagauacuggcagaugcggccucuguuccuggaauugcugggaaaccacgcucagug
cccguacggaguccugcucaagacucacugcccucugagggcggcggucacuccggcggccggagugugcgcacgggagaag
ccccagggaagcguggcagcuccggaagaggaggacaccgauccgcgccgccucgugcaacuucugcgccagcacuccucgcc
cuggcaagucuacggguucguccgcgccugccugcgccgccuggugccgccugggcucugggguucccggcauaacgagcg
ccgcuuccugagaaauacuaagaaguuuaucucacuuggaaaacaugccaaguugucgcugcaagaacucacguggaagaug
ucaguccgcgauugcgccuggcugcgccgcucgccgggcgucggguguguuccagcugcagaacaccgccugagagaagaaa
uucuggccaaauuucugcauuggcugaugucaguguacguggucgagcugcugcgcuccuuuuucuacgucacugagacua
ccuuucaaaagaaccgccuguucuucuaccgcaaaucuguguggagcaagcugcagucaaucggcauucgccagcaucugaa
gagggugcagcugcgggaacuuuccgaggcagaaguccgccagcaccgggaggcccggccggcgcuucucacgucgcgucug
agauucaucccaaagcccgacgggcugaggccuaucgucaacauggauuacgucgugggcgcucgcaccuuucgccgugaaa
agcgggccgaacgcuugaccucacgggugaaggcccucuucuccgugcugaacuacgagagagcaagacggccuggccugcu
gggagcuucggugcugggacuggacgauauccaccgggcuuggcggaccuuuguucuccgggugagagcccaagacccucc
gccggaacuguacuucgugaagguggcgaucaccggagccuaugauacuauuccgcaagaucgacucaccgaagucaucgcc
ucgaucaucaaaccgcagaacacuuacugcgucaggcgguacgccgugguccagaaggccgcgcauggccacgugagaaagg
cguucaagucgcacguguccacucucaccgaccuccagccuuacaugaggcaauucguugcgcauuugcaagagacuucgcc
ccugagagaugcgguggucaucgagcagagcuccagccugaacgaagcgagcagcggucuguuugacguguuccuccgcuuc
augugucaucacgcggugcgaaucaggggaaaaucauacgugcagugccagggaaucccacaaggcagcauucugucgacuc
ucuuguguucccuuugcuacggcgauauggaaaacaagcuguucgcugggaucagacgggacggguugcugcucagacugg
uggacgacuuccugcuggugacuccgcaccucacucacgccaaaaccuuucuccgcacucuggugaggggagugccagaaua
cggcuguguggucaaucuccggaaaacuguggugaauuucccugucgaggaugaggcacucggaggaaccgcauuugucca
aaugccagcacauggccuguucccauggugcggucugcugcuggacacccgaacucuugaagugcaguccgacuacuccagc
uaugcccggacgagcauccgcgccagccucacuuucaaucgcggcuuuaaggccggacgaaacaugcgcagaaagcuuuucg
gaguccuccggcuuaaaugccauucgcucuuucucgaucuccaagucaauucgcugcagaccgugugcacgaacaucuacaa
gauccugcugcuccaagccuaccgguuccacgcuugcgugcuucagcugccguuucaccaacagguguggaagaacccgacc
uucuuucugcgggucauuagcgauacugccucccuguguuacucaauccucaaggcaaagaacgccggaaugucgcugggug
cgaaaggagccgcgggaccucuuccuagcgaagcggugcaguggcucugccaccaggcuuuccuccugaagcugaccaggca
cagagugaccuacgucccgcugcugggcucgcugcgcacugcacagacccagcugucuagaaaacuccccggcaccacccuga
ccgcucuggaagccgccgccaacccagcauugccgucagauuucaagaccaucuuggac.
Plasmid 1429 ORF (RNA)

SEQ ID NO: 92

auggcuagcaagcugaccauugagagcacucccuucaacguggcugaggggaaggaggugcugcuccuggugcacaaucugc
cccagcaccuguucggguacuccugguacaagggagaacgcguggacgggaaccggcagaucauaggcuacgucaucggaac
ccagcaggccacacccgguccagcguacagcggccgggagauuaucuacccgaacgccucccugcugauccaaaacaucaucc
agaacgacaccgguuucuacacucugcacgugauuaagucagaucuggucaacgaagaggccaccggccaauucagggugua
ccccgaacucccuaagccguucaucaccucgaacaacagcaacccggucgaggaugaagaugcgguggccuugacgugcgaac
cugagauccagaacaccaccuacuuguggugggugaacaaucagagccugccagucuccccacgacuccagcugucgaacgac
aacaggacccugacuuugcuguccgugacucggaacgacgugggcccuuaugaaugcgguauccagaacaagcuguccgugg
accacagcgacccugugauccugaacguccuuuacgggccggacgaccccaccauuuccccgucguacacuuacuaccggccg
ggcgugaaccugucccugucgugccacgcugccuccaauccgccggcccaguacuccuggcucaucgacggaaacauccagca
gcacacccaagaacuguucaucuccaacauuaccgagaaaaacucgggacuuuacaccugucaagccaacaauuccgccagcg
gccacucccgcaccacugucaaaacuaucacuguguccgccgaacucccgaagcccagcaucagcuccaacaacucgaagcccg
uggaggauaaggacgcugucgcguucaccugugaaccagaggcacagaauaccaccuaccuuuggugggucaacggacaguc
ccugccugucucaccgagacugcagcugucaaacgggaauaggacucugaccuuguuuaacgucacccggaacgacgcccgg
gccuacgugugcggcauccagaacuccgugagcgcaaaccggucugacccagugacccuggaugugcuguacggccccgaca
cuccgaucauuucaccccccgauucauccuaccuguccggcgcuaaccucaaccucucaugccacuccgcauccaaccccagcc
cgcaauauucguggcgcauuaacggaauuccucagcaacauacccagguccuguucauugcgaagaucaccccuaacaacaac
ggaaccuacgccugcuuugugucaaaccuggccacugguagaaacaacuccaucgugaaguccauuaccgugucggcguccg
gauccggcgagggcagaggcagccugcugacauguggcgacguggaagagaacccuggccccggagcugccccggagccgga
gaggacccccguuggccagggaucgugggcccauccgggacgcaccaggggaccauccgacaggggauucugugugguguca
ccggccaggccagcagaagaggcaaccagccucgagggagcguugucuggaaccagacauucccacccgucggugggccggc
agcaccacgcgggaccaccguccacuuccagaccgccacggccaugggacaccccuugcccgccuguguaugccgagacuaaa
cacuuccuguacucauccggagacaaggaacagcuucggccguccuuccuccugucgucgcucagaccgagccugaccggag
cacgcagauugguggaaacuaucuuccuugggucacguccguggaugccagguaccccacggcgccucccgcgccucccaca
gagauacuggcagaugcggccucuguuccuggaauugcugggaaaccacgcucagugcccguacggaguccugcucaagacu
cacugcccucugagggcggcggucacuccggcggccggagugugcgcacgggagaagccccagggaagcguggcagcuccgg
aagaggaggacaccgauccgcgccgccucgugcaacuucugcgccagcacuccucgcccuggcaagucuacggguucguccg
cgccugccugcgccgccuggugccgccugggcucugggguucccggcauaacgagcgccgcuuccugagaaauacuaagaag
uuuaucucacuuggaaaacaugccaaguugucgcugcaagaacucacguggaagaugucaguccgcgauugcgccuggcugc
gccgcucgccgggcgucggguguguuccagcugcagaacaccgccugagagaagaaauucuggccaaauuucugcauuggcu
gaugucaguguacguggucgagcugcugcgcuccuuuuucuacgucacugagacuaccuuucaaaagaaccgccuguucuuc
uaccgcaaaucuguguggagcaagcugcagucaaucggcauucgccagcaucugaagagggugcagcugcgggaacuuuccg
aggcagaaguccgccagcaccgggaggcccggccggcgcuucucacgucgcgucugagauucaucccaaagcccgacgggcu
gaggccuaucgucaacauggauuacgucgugggcgcucgcaccuuucgccgugaaaagcgggccgaacgcuugaccucacgg
gugaaggcccucuucuccgugcugaacuacgagagagcaagacggccuggccugcugggagcuucggugcugggacuggac
gauauccaccgggcuuggcggaccuuuguucuccgggugagagcccaagacccuccgccggaacuguacuucgugaaggugg
cgaucaccggagccuaugauacuauuccgcaagaucgacucaccgaagucaucgccucgaucaucaaaccgcagaacacuuac
ugcgucaggcgguacgccgugguccagaaggccgcgcauggccacgugagaaaggcguucaagucgcacguguccacucuca
ccgaccuccagccuuacaugaggcaauucguugcgcauuugcaagagacuucgccccugagagaugcgguggucaucgagca
gagcuccagccugaacgaagcgagcagcggucuguuugacguguuccuccgcuucaugugucaucacgcggugcgaaucagg
ggaaaaucauacgugcagugccagggaaucccacaaggcagcauucugucgacucucuuguguucccuuugcuacggcgaua
uggaaaacaagcuguucgcugggaucagacgggacggguugcugcucagacugguggacgacuuccugcuggugacuccgc
accucacucacgccaaaaccuuucuccgcacucuggugaggggagugccagaauacggcuguguggucaaucuccggaaaac
uguggugaauuucccugucgaggaugaggcacucggaggaaccgcauuuguccaaaugccagcacauggccuguucccaugg
ugcggucugcugcuggacacccgaacucuugaagugcaguccgacuacuccagcuaugcccggacgagcauccgcgccagcc
ucacuuucaaucgcggcuuuaaggccggacgaaacaugcgcagaaagcuuuucggaguccuccggcuuaaaugccauucgcu
cuuucucgaucuccaagucaauucgcugcagaccgugugcacgaacaucuacaagauccugcugcuccaagccuaccgguucc
acgcuugcgugcuucagcugccguuucaccaacagguguggaagaacccgaccuucuuucugcgggucauuagcgauacugc
cucccuguguuacucaauccucaaggcaaagaacgccggaaugucgcugggugcgaaaggagccgcgggaccucuuccuagc
gaagcggugcaguggcucugccaccaggcuuuccuccugaagcugaccaggcacagagugaccuacgucccgcugcugggcu
cgcugcgcacugcacagacccagcugucuagaaaacuccccggcaccacccugaccgcucuggaagccgccgccaacccagcau
ugccgucagauuucaagaccaucuuggacggauccggcacaauccugucugagggcgccaccaacuucagccugcugaaacu
ggccggcgacguggaacugaacccuggcccuaccccuggaacccagagccccuucuuccuucugcugcugcugaccgugcug
acugucgugacaggcucuggccacgccagcucuacaccuggcggcgagaaagagacaagcgccacccagagaagcagcgugcc
aagcagcaccgagaagaacgccguguccaugaccagcuccgugcugagcagccacucuccuggcagcggcagcagcacaacac
agggccaggaugugacacuggccccugccacagaaccugccucuggaucugccgccaccuggggacaggacgugacaagcgu
gccagugaccagaccugcccugggcucuacaacacccccugcccacgaugugaccagcgccccugauaacaagccugccccug
gaagcacagccccuccagcucauggcgugaccucugccccagauaccagaccagccccaggaucuacagccccacccgcacacg
gcgugacaagugccccugacacaagacccgcuccaggcucuacugcuccuccugcccauggcgugacaagcgcucccgauaca
aggccagcuccuggcuccacagcaccaccagcacauggcgugacaucagcucccgacacuagaccugcucccggaucaaccgc
uccaccagcucacggcgugaccagcgcaccugauaccagaccugcucugggaagcaccgccccucccgugcacaaugugacau
cugcuuccggcagcgccagcggcucugccucuacacuggugcacaacggcaccagcgccagagccacaacaaccccagccagc
aagagcacccccuucagcaucccuagccaccacagcgacaccccuaccacacuggccagccacuccaccaagaccgaugccucu
agcacccaccacuccagcgugcccccucugaccagcagcaaccacagcacaagcccccagcugucuaccggcgucucauucuuc
uuucuguccuuccacaucagcaaccugcaguucaacagcagccuggaagaucccagcaccgacuacuaccaggaacugcagcg
ggauaucagcgagauguuccugcaaaucuacaagcagggcggcuuccugggccugagcaacaucaaguucagacccggcagc
gugguggugcagcugacccuggcuuuccgggaaggcaccaucaacgugcacgacguggaaacccaguucaaccaguacaaga
ccgaggccgccagccgguacaaccugaccaucuccgauguguccguguccgacgugcccuucccauucucugcccagucugg
cgcaggcgugccaggauggggaauugcucugcuggugcucgugugcgugcugguggcccuggccaucguguaucugauug
cccuggccgugugccagugccggcggaagaauuacggccagcuggacaucuuccccgccagagacaccuaccaccccaugagc
gaguaccccacauaccacacccacggcagauacgugccacccagcuccaccgacagaucccccuacgagaaagugucugccggc
aacggcggcagcucccugagcuacacaaauccugccguggccgcugccuccgccaaccug.

1. An antigen construct, comprising a nucleotide sequence encoding an immunogenic CEA polypeptide.

2. The antigen construct according to claim 1, further comprising: (1) a nucleotide sequence encoding an immunogenic MUC1 polypeptide; or (2) a nucleotide sequence encoding an immunogenic TERT polypeptide.

3. The antigen construct according to claim 2, wherein the immunogenic CEA polypeptide is selected from the group consisting of:
(1) a polypeptide comprising amino acids 2-702 of SEQ ID NO:2, amino acids 323-702 of SEQ ID NO:2, or amino acids 323-677 of SEQ ID NO:2;
(2) a polypeptide comprising amino acid sequence of SEQ ID NO:15 or amino acids 4-704 of SEQ ID NO:15;
(3) a polypeptide comprising the amino acid sequence of SEQ ID NO:17 or amino acids 4-526 of SEQ ID NO:17;
(4) a polypeptide comprising the sequence of SEQ ID NO:19 or amino acids 4-468 of SEQ ID NO:19; and
(5) a polypeptide that is a functional variant of any of the polypeptides (1)-(4) above.

4. The antigen construct according to claim 1, further comprising a nucleotide sequence encoding an immunogenic MUC1 polypeptide and a nucleotide sequence encoding an immunogenic TERT polypeptide.

5. The antigen construct according to claim 4, further comprising a spacer nucleotide sequence.

6. The antigen construct according to claim 5, wherein the spacer nucleotide sequence encodes a 2A peptide.

7. The antigen construct according to claim 6, wherein the 2A peptide is selected from the group consisting of EMC2A, ERA2A, ERB2A, and T2A.

8. The antigen construct according to claim 4, wherein the immunogenic CEA polypeptide is selected from the group consisting of:
(1) a polypeptide comprising amino acids 2-702 of SEQ ID NO:2, amino acids 323-702 of SEQ ID NO:2, or amino acids 323-677 of SEQ ID NO:2;
(2) a polypeptide comprising amino acid sequence of SEQ ID NO:15 or amino acids 4-704 of SEQ ID NO:15;
(3) a polypeptide comprising the amino acid sequence of SEQ ID NO:17 or amino acids 4-526 of SEQ ID NO:17;
(4) a polypeptide comprising the sequence of SEQ ID NO:19 or amino acids 4-468 of SEQ ID NO:19; and
(5) a polypeptide that is a functional variant of any of the polypeptides (1)-(4) above.

9. The antigen construct according to claim 4, wherein the nucleotide sequence that encodes the immunogenic CEA polypeptide is selected from the group consisting of:
(1) the nucleotide sequence of SEQ ID NO:14 or a nucleotide sequence comprising nucleotides 10-2112 of SEQ ID NO:14;
(2) the nucleotide sequence of SEQ ID NO:16 or a nucleotide sequence comprising nucleotides 10-1578 of SEQ ID NO:16;
(3) the nucleotide sequence of SEQ ID NO:18 or a nucleotide sequence comprising nucleotides 10-1404 of SEQ ID NO:18; and
(4) a nucleotide sequence that is a degenerate variant of any of the nucleotide sequences (1)-(3) above.

10. The antigen construct according to claim 4, wherein the immunogenic TERT polypeptide is selected from the group consisting of:
(1) a polypeptide comprising the amino acid sequence of SEQ ID NO:9 or amino acids 2-893 of SEQ ID NO:9;
(2) a polypeptide comprising the amino acid sequence of SEQ ID NO:11 or amino acids 3-791 of SEQ ID NO:11;
(3) a polypeptide comprising the amino acid sequence of SEQ ID NO:13 or amino acids 4-594 of SEQ ID NO:13; and
(4) a polypeptide that is a functional variant of any of the polypeptides (1)-(3) above.

11. The antigen construct according to claim 4, wherein the nucleotide sequence that encodes the immunogenic TERT polypeptide is selected from the group consisting of:
(1) the nucleotide sequence of SEQ ID NO:8 or a nucleotide sequence comprising nucleotides 4-2673 of SEQ ID NO:8;
(2) the nucleotide sequence of SEQ ID NO:10 or a nucleotide sequence comprising nucleotides 10-2373 of SEQ ID NO:10;
(3) the nucleotide sequence of SEQ ID NO:12 or a nucleotide sequence comprising nucleotides 10-1782 of SEQ ID NO:12; and
(4) a degenerate variant of any of the nucleotide sequences (1)-(3) above.

12. The antigen construct according to claim 4, wherein the immunogenic MUC1 polypeptide is selected from the group consisting of:
(1) a polypeptide comprising the amino acid sequence of SEQ ID NO:5 or amino acids 4-537 of SEQ ID NO:5;
(2) a polypeptide comprising the amino acid sequence of SEQ ID NO:7 or amino acids 4-517 of SEQ ID NO:7; and
(3) a functional variant of any of the polypeptides (1) or (2) above.

13. The antigen construct according to claim 4, wherein the nucleotide sequence that encodes the immunogenic MUC1 polypeptide is selected from the group consisting of:
(1) the nucleotide sequence of SEQ ID NO:4 or a nucleotide sequence comprising nucleotides 10-1611 of SEQ ID NO:4;
(2) the nucleotide sequence of SEQ ID NO:6 or a nucleotide sequence comprising nucleotides 10-1551 of SEQ ID NO:6; and
(3) a degenerate variant of the nucleotide sequence of SEQ ID NO:4 or SEQ ID NO 6.

14. The antigen construct according to claim 8, wherein the immunogenic TERT polypeptide is selected from the group consisting of:
(1) a polypeptide comprising the amino acid sequence of SEQ ID NO:9 or amino acids 2-893 of SEQ ID NO:9;
(2) a polypeptide comprising the amino acid sequence of SEQ ID NO:11 or amino acids 3-791 of SEQ ID NO:11;
(3) a polypeptide comprising the amino acid sequence of SEQ ID NO:13 or amino acids 4-594 of SEQ ID NO:13; and
(4) a polypeptide that is a functional variant of any of the polypeptides (1)-(3) above.

15. The antigen construct according to claim 8, wherein the immunogenic MUC1 polypeptide is selected from the group consisting of:
(1) a polypeptide comprising the amino acid sequence of SEQ ID NO:5 or amino acids 4-537 of SEQ ID NO:5;
(2) a polypeptide comprising the amino acid sequence of SEQ ID NO:7 or amino acids 4-517 of SEQ ID NO:7; and
(3) a functional variant of the polypeptide (1) or (2) above.

16. The antigen construct according to claim 14, wherein the immunogenic MUC1 polypeptide is selected from the group consisting of:
(1) a polypeptide comprising the amino acid sequence of SEQ ID NO:5 or amino acids 4-537 of SEQ ID NO:5;
(2) a polypeptide comprising the amino acid sequence of SEQ ID NO:7 or amino acids 4-517 of SEQ ID NO:7; and
(3) a functional variant of the polypeptide (1) or (2) above.

17. The antigen construct according to claim 4, wherein:
(1) the amino acid sequence of the immunogenic MUC1 polypeptide comprises amino acids 4-537 of SEQ ID NO:5;
(2) the amino acid sequence of the immunogenic TERT polypeptide comprises amino acids 2-893 of SEQ ID NO:9; and
(3) the amino acid sequence of the immunogenic CEA polypeptide comprises amino acids 4-468 of SEQ ID NO:19.

18. The antigen construct according to claim 4, wherein:
(1) the nucleotide sequence encoding the immunogenic MUC1 polypeptide comprises nucleotides 10-1611 of SEQ ID NO:4;
(2) the nucleotide sequence encoding the immunogenic TERT polypeptide comprises nucleotides 4-2673 of SEQ ID NO:8; and
(3) the nucleotide sequence encoding the immunogenic CEA polypeptide comprises nucleotides 10-1404 of SEQ ID NO:18.

19. The antigen construct according to claim 1, which comprises a nucleotide sequence encoding an amino acid sequence selected from the group consisting of:
(1) the amino acid sequence of SEQ ID NO:31 or an amino acid sequence comprising amino acids 4-1088 of SEQ ID NO:31;
(2) the amino acid sequence of SEQ ID NO:33 or an amino acid sequence comprising amino acids 4-1081 of SEQ ID NO:33;
(3) the amino acid sequence of SEQ ID NO:35 or an amino acid sequence comprising amino acids 4-1085 of SEQ ID NO:35;
(4) the amino acid sequence of SEQ ID NO:37 or an amino acid sequence comprising an amino acid sequence comprising amino acids 4-1030 of SEQ ID NO:37;
(5) the amino acid sequence of SEQ ID NO:39 or an amino acid sequence comprising amino acids 4-1381 of SEQ ID NO:39; and
(6) the amino acid sequence of SEQ ID NO:41 or an amino acid sequence comprising amino acids 4-1441 of SEQ ID NO:41.

20. The antigen construct according to claim 1, which comprises a nucleotide sequence selected from the group consisting of:
(1) the nucleotide sequence of SEQ ID NO:30 or a nucleotide sequence comprising nucleotides 10-3264 of SEQ ID NO:30;
(2) the nucleotide sequence of SEQ ID NO:32 or a nucleotide sequence comprising nucleotides 10-3243 of SEQ ID NO:32;
(3) the nucleotide sequence of SEQ ID NO:34 or a nucleotide sequence comprising nucleotides 10-3255 of SEQ ID NO:34;
(4) the nucleotide sequence of SEQ ID NO:36 or a nucleotide sequence comprising nucleotides 10-3090 of SEQ ID NO:36;
(5) the nucleotide sequence of SEQ ID NO:38 or a nucleotide sequence comprising nucleotides 10-4143 of SEQ ID NO:38;
(6) the nucleotide sequence of SEQ ID NO:40 or a nucleotide sequence comprising nucleotides 10-4323 of SEQ ID NO:40; and
(7) a nucleotide sequences that is a degenerate variant of any of the nucleotide sequences of (1)-(6) above.

21. The antigen construct according to claim 1, which comprises a nucleotide sequence encoding an amino acid sequence selected from the group consisting of:
(1) the amino acid sequence of SEQ ID NO:43 or an amino acid sequence comprising amino acids 4-2003 of SEQ ID NO:43;
(2) the amino acid sequence of SEQ ID NO:45 or an amino acid sequence comprising amino acids 4-2001 of SEQ ID NO:45;
(3) the amino acid sequence of SEQ ID NO:47 or an amino acid sequence comprising amino acids 4-2008 of SEQ ID NO:47;
(4) the amino acid sequence of SEQ ID NO:49 or an amino acid sequence comprising amino acids 4-1996 of SEQ ID NO: 49;
(5) the amino acid sequence of SEQ ID NO:51 or an amino acid sequence comprising amino acids 4-1943 of SEQ ID NO:51; and
(6) the amino acid sequence of SEQ ID NO:53 or an amino acid sequence comprising amino acids 4-1943 of SEQ ID NO:53.

22. The antigen construct according to claim 1, which comprises a nucleotide sequence selected from the group consisting of:
(1) the nucleotide sequence of SEQ ID NO:42 or a nucleotide sequence comprising nucleotides 10-6009 of SEQ ID NO:42;
(2) the nucleotide sequence of SEQ ID NO:44 or a nucleotide sequence comprising nucleotides 10-6003 of SEQ ID NO:44;
(3) the nucleotide sequence of SEQ ID NO:46 or a nucleotide sequence comprising nucleotides 10-6024 of SEQ ID NO:46;
(4) the nucleotide sequence of SEQ ID NO:48 or a nucleotide sequence comprising nucleotides 10-5988 of SEQ ID NO:48;
(5) the nucleotide sequence of SEQ ID NO:50 or a nucleotide sequence comprising nucleotides 10-5829 of SEQ ID NO:50;
(6) the nucleotide sequence of SEQ ID NO:52 or a nucleotide sequence comprising nucleotides 10-5829 of SEQ ID NO:52; and
(7) a nucleotide sequence that is a degenerate variant of any of the nucleotide sequences of (1)-(6) above.

23. The antigen construct according to claim 21, which comprises a nucleotide sequence encoding the amino acid sequence of SEQ ID NO:51 or an amino acid sequence comprising amino acids 4-1943 of SEQ ID NO:51.

24. The antigen construct according to claim 1, which comprises the nucleotide sequence of SEQ ID NO:50 or a nucleotide sequence comprising nucleotides 10-5829 of SEQ ID NO:50.

25. The antigen construct according to claim 1, which comprises:
(1) a nucleotide sequence of any of SEQ ID NOs: 87, 88, 89, 90, 91, and 92; or
(2) a degenerate variant of any of the nucleotide sequence of SEQ ID NOS: 87, 88, 89, 90, 91, or 92.

26. A vector, comprising an antigen construct according to claim 4.

27. The vector according to claim 26, wherein:
(1) the amino acid sequence of the immunogenic MUC1 polypeptide comprises amino acids 4-537 of SEQ ID NO:5;
(2) the amino acid sequence of the immunogenic TERT polypeptide comprises amino acids 2-893 of SEQ ID NO:9; and
(3) the amino acid sequence of the immunogenic CEA polypeptide comprises amino acids 4-468 of SEQ ID NO:19.

28. The vector according to claim 26, wherein:
(1) the nucleotide sequence encoding the immunogenic MUC1 polypeptide comprises nucleotides 10-1611 of SEQ ID NO:4;
(2) the nucleotide sequence encoding the immunogenic TERT polypeptide comprises nucleotides 4-2673 of SEQ ID NO:8; and
(3) the nucleotide sequence encoding the immunogenic CEA polypeptide comprises nucleotides 10-1404 of SEQ ID NO:18.

29. The vector according to claim 26, which is a plasmid vector.

30. The vector according to claim 26, which is a viral vector.

31. The vector according to claim 26, which comprises a nucleotide sequence encoding an amino acid sequence of SEQ ID NO:43, 45, 47 49, 51, or 53.

32. The vector according to claim 26, which comprises: (1) a nucleotide sequence SEQ ID NO:42, 44, 46, 48, 50, or 52; or (2) a degenerate variant of the nucleotide sequence SEQ ID NO:42, 44, 46, 48, 50, or 52.

33. The vector according to claim 26, which comprises a nucleotide sequence of SEQ ID NO: 57, 59, 61, 63, 65, 67, 69, 70, 71, 72, 73, or 74.

34. The vector according to claim 26, which comprises a nucleotide sequence of SEQ ID NO: 58, 60, 62, 64, 66, or 68.

35. A pharmaceutical composition comprising: (i) a vector according to claim 26; and (ii) a pharmaceutically acceptable carrier.

36. A method of treating cancer in a human in need of treatment, comprising administering to the human an effective amount of the pharmaceutical composition according to claim 35.

The application's sequence listing, which the Patent Office published only in electronic form, follows.

SEQUENCE LISTING (93 sequences)

SEQ ID NO: 1 - protein, 1255 aa, Homo sapiens
MTPGTQSPFFLLLLLTVLTVVTGSGHASSTPGGEKETSATQRSSVPSSTEKNAVSMTSSVLSSHSPGSGSSTTQGQDVTLAPATEPASGSAATWGQDVTSVPVTRPALGSTTPPAHDVTSAPDNKPAPGSTAPPAHGVTSAPDTRPAPGSTAPPAHGVTSAPDTRPAPGSTAPPAHGVTSAPDTRPAPGSTAPPAHGVTSAPDTRPAPGSTAPPAHGVTSAPDTRPAPGSTAPPAHGVTSAPDTRPAPGSTAPPAHGVTSAPDTRPAPGSTAPPAHGVTSAPDTRPAPGSTAPPAHGVTSAPDTRPAPGSTAPPAHGVTSAPDTRPAPGSTAPPAHGVTSAPDTRPAPGSTAPPAHGVTSAPDTRPAPGSTAPPAHGVTSAPDTRPAPGSTAPPAHGVTSAPDTRPAPGSTAPPAHGVTSAPDTRPAPGSTAPPAHGVTSAPDTRPAPGSTAPPAHGVTSAPDTRPAPGSTAPPAHGVTSAPDTRPAPGSTAPPAHGVTSAPDTRPAPGSTAPPAHGVTSAPDTRPAPGSTAPPAHGVTSAPDTRPAPGSTAPPAHGVTSAPDTRPAPGSTAPPAHGVTSAPDTRPAPGSTAPPAHGVTSAPDTRPAPGSTAPPAHGVTSAPDTRPAPGSTAPPAHGVTSAPDTRPAPGSTAPPAHGVTSAPDTRPAPGSTAPPAHGVTSAPDTRPAPGSTAPPAHGVTSAPDTRPAPGSTAPPAHGVTSAPDTRPAPGSTAPPAHGVTSAPDTRPAPGSTAPPAHGVTSAPDTRPAPGSTAPPAHGVTSAPDTRPAPGSTAPPAHGVTSAPDTRPAPGSTAPPAHGVTSAPDTRPAPGSTAPPAHGVTSAPDTRPAPGSTAPPAHGVTSAPDTRPAPGSTAPPAHGVTSAPDTRPAPGSTAPPAHGVTSAPDTRPAPGSTAPPAHGVTSAPDTRPAPGSTAPPAHGVTSAPDNRPALGSTAPPVHNVTSASGSASGSASTLVHNGTSARATTTPASKSTPFSIPSHHSDTPTTLASHSTKTDASSTHHSSVPPLTSSNHSTSPQLSTGVSFFFLSFHISNLQFNSSLEDPSTDYYQELQRDISEMFLQIYKQGGFLGLSNIKFRPGSVVVQLTLAFREGTINVHDVETQFNQYKTEAASRYNLTISDVSVSDVPFPFSAQSGAGVPGWGIALLVLVCVLVALAIVYLIALAVCQCRRKNYGQLDIFPARDTYHPMSEYPTYHTHGRYVPPSSTDRSPYEKVSAGNGGSSLSYTNPAVAATSANL

SEQ ID NO: 2 - protein, 702 aa, Homo sapiens
MESPSAPPHRWCIPWQRLLLTASLLTFWNPPTTAKLTIESTPFNVAEGKEVLLLVHNLPQHLFGYSWYKGERVDGNRQIIGYVIGTQQATPGPAYSGREIIYPNASLLIQNIIQNDTGFYTLHVIKSDLVNEEATGQFRVYPELPKPSISSNNSKPVEDKDAVAFTCEPETQDATYLWWVNNQSLPVSPRLQLSNGNRTLTLFNVTRNDTASYKCETQNPVSARRSDSVILNVLYGPDAPTISPLNTSYRSGENLNLSCHAASNPPAQYSWFVNGTFQQSTQELFIPNITVNNSGSYTCQAHNSDTGLNRTTVTTITVYAEPPKPFITSNNSNPVEDEDAVALTCEPEIQNTTYLWWVNNQSLPVSPRLQLSNDNRTLTLLSVTRNDVGPYECGIQNKLSVDHSDPVILNVLYGPDDPTISPSYTYYRPGVNLSLSCHAASNPPAQYSWLIDGNIQQHTQELFISNITEKNSGLYTCQANNSASGHSRTTVKTITVSAELPKPSISSNNSKPVEDKDAVAFTCEPEAQNTTYLWWVNGQSLPVSPRLQLSNGNRTLTLFNVTRNDARAYVCGIQNSVSANRSDPVTLDVLYGPDTPIISPPDSSYLSGANLNLSCHSASNPSPQYSWRINGIPQQHTQVLFIAKITPNNNGTYACFVSNLATGRNNSIVKSITVSASGTSPGLSAGATVGIMIGVLVGVALI

SEQ ID NO: 3 - protein, 1132 aa, Homo sapiens
MPRAPRCRAVRSLLRSHYREVLPLATFVRRLGPQGWRLVQRGDPAAFRALVAQCLVCVPWDARPPPAAPSFRQVSCLKELVARVLQRLCERGAKNVLAFGFALLDGARGGPPEAFTTSVRSYLPNTVTDALRGSGAWGLLLRRVGDDVLVHLLARCALFVLVAPSCAYQVCGPPLYQLGAATQARPPPHASGPRRRLGCERAWNHSVREAGVPLGLPAPGARRRGGSASRSLPLPKRPRRGAAPEPERTPVGQGSWAHPGRTRGPSDRGFCVVSPARPAEEATSLEGALSGTRHSHPSVGRQHHAGPPSTSRPPRPWDTPCPPVYAETKHFLYSSGDKEQLRPSFLLSSLRPSLTGARRLVETIFLGSRPWMPGTPRRLPRLPQRYWQMRPLFLELLGNHAQCPYGVLLKTHCPLRAAVTPAAGVCAREKPQGSVAAPEEEDTDPRRLVQLLRQHSSPWQVYGFVRACLRRLVPPGLWGSRHNERRFLRNTKKFISLGKHAKLSLQELTWKMSVRDCAWLRRSPGVGCVPAAEHRLREEILAKFLHWLMSVYVVELLRSFFYVTETTFQKNRLFFYRKSVWSKLQSIGIRQHLKRVQLRELSEAEVRQHREARPALLTSRLRFIPKPDGLRPIVNMDYVVGARTFRREKRAERLTSRVKALFSVLNYERARRPGLLGASVLGLDDIHRAWRTFVLRVRAQDPPPELYFVKVDVTGAYDTIPQDRLTEVIASIIKPQNTYCVRRYAVVQKAAHGHVRKAFKSHVSTLTDLQPYMRQFVAHLQETSPLRDAVVIEQSSSLNEASSGLFDVFLRFMCHHAVRIRGKSYVQCQGIPQGSILSTLLCSLCYGDMENKLFAGIRRDGLLLRLVDDFLLVTPHLTHAKTFLRTLVRGVPEYGCVVNLRKTVVNFPVEDEALGGTAFVQMPAHGLFPWCGLLLDTRTLEVQSDYSSYARTSIRASLTFNRGFKAGRNMRRKLFGVLRLKCHSLFLDLQVNSLQTVCTNIYKILLLQAYRFHACVLQLPFHQQVWKNPTFFLRVISDTASLCYSILKAKNAGMSLGAKGAAGPLPSEAVQWLCHQAFLLKLTRHRVTYVPLLGSLRTAQTQLSRKLPGTTLTALEAAANPALPSDFKTILD

SEQ ID NO: 4 - DNA, 1611 bp, Artificial Sequence
  Synthetic Construct
atggctagcacccctggaacccagagccccttcttccttctgctgctgctgaccgtgctgactgtcgtgacaggctctggccacgccagctctacacctggcggcgagaaagagacaagcgccacccagagaagcagcgtgccaagcagcaccgagaagaacgccgtgtccatgaccagctccgtgctgagcagccactctcctggcagcggcagcagcacaacacagggccaggatgtgacactggcccctgccacagaacctgcctctggatctgccgccacctggggacaggacgtgacaagcgtgccagtgaccagacctgccctgggctctacaacaccccctgcccacgatgtgaccagcgcccctgataacaagcctgcccctggaagcacagcccctccagctcatggcgtgacctctgccccagataccagaccagccccaggatctacagccccacccgcacacggcgtgacaagtgcccctgacacaagacccgctccaggctctactgctcctcctgcccatggcgtgacaagcgctcccgatacaaggccagctcctggctccacagcaccaccagcacatggcgtgacatcagctcccgacactagacctgctcccggatcaaccgctccaccagctcacggcgtgaccagcgcacctgataccagacctgctctgggaagcaccgcccctcccgtgcacaatgtgacatctgcttccggcagcgccagcggctctgcctctacactggtgcacaacggcaccagcgccagagccacaacaaccccagccagcaagagcacccccttcagcatccctagccaccacagcgacacccctaccacactggccagccactccaccaagaccgatgcctctagcacccaccactccagcgtgccccctctgaccagcagcaaccacagcacaagcccccagctgtctaccggcgtctcattcttctttctgtccttccacatcagcaacctgcagttcaacagcagcctggaagatcccagcaccgactactaccaggaactgcagcgggatatcagcgagatgttcctgcaaatctacaagcagggcggcttcctgggcctgagcaacatcaagttcagacccggcagcgtggtggtgcagctgaccctggctttccgggaaggcaccatcaacgtgcacgacgtggaaacccagttcaaccagtacaagaccgaggccgccagccggtacaacctgaccatctccgatgtgtccgtgtccgacgtgcccttcccattctctgcccagtctggcgcaggcgtgccaggatggggaattgctctgctggtgctcgtgtgcgtgctggtggccctggccatcgtgtatctgattgccctggccgtgtgccagtgccggcggaagaattacggccagctggacatcttccccgccagagacacctaccaccccatgagcgagtaccccacataccacacccacggcagatacgtgccacccagctccaccgacagatccccctacgagaaagtgtctgccggcaacggcggcagctccctgagctacacaaatcctgccgtggccgctgcctccgccaacctg

SEQ ID NO: 5 - protein, 537 aa, Artificial Sequence
  Synthetic Construct
MASTPGTQSPFFLLLLLTVLTVVTGSGHASSTPGGEKETSATQRSSVPSSTEKNAVSMTSSVLSSHSPGSGSSTTQGQDVTLAPATEPASGSAATWGQDVTSVPVTRPALGSTTPPAHDVTSAPDNKPAPGSTAPPAHGVTSAPDTRPAPGSTAPPAHGVTSAPDTRPAPGSTAPPAHGVTSAPDTRPAPGSTAPPAHGVTSAPDTRPAPGSTAPPAHGVTSAPDTRPALGSTAPPVHNVTSASGSASGSASTLVHNGTSARATTTPASKSTPFSIPSHHSDTPTTLASHSTKTDASSTHHSSVPPLTSSNHSTSPQLSTGVSFFFLSFHISNLQFNSSLEDPSTDYYQELQRDISEMFLQIYKQGGFLGLSNIKFRPGSVVVQLTLAFREGTINVHDVETQFNQYKTEAASRYNLTISDVSVSDVPFPFSAQSGAGVPGWGIALLVLVCVLVALAIVYLIALAVCQCRRKNYGQLDIFPARDTYHPMSEYPTYHTHGRYVPPSSTDRSPYEKVSAGNGGSSLSYTNPAVAAASANL

SEQ ID NO: 6 - DNA, 1551 bp, Artificial Sequence
  Synthetic Construct
atggctagcacaggctctggccacgccagctctacacctggcggcgagaaagagacaagcgccacccagagaagcagcgtgccaagcagcaccgagaagaacgccgtgtccatgaccagctccgtgctgagcagccactctcctggcagcggcagcagcacaacacagggccaggatgtgacactggcccctgccacagaacctgcctctggatctgccgccacctggggacaggacgtgacaagcgtgccagtgaccagacctgccctgggctctacaacaccccctgcccacgatgtgaccagcgcccctgataacaagcctgcccctggaagcacagcccctccagctcatggcgtgacctctgccccagataccagaccagccccaggatctacagccccacccgcacacggcgtgacaagtgcccctgacacaagacccgctccaggctctactgctcctcctgcccatggcgtgacaagcgctcccgatacaaggccagctcctggctccacagcaccaccagcacatggcgtgacatcagctcccgacactagacctgctcccggatcaaccgctccaccagctcacggcgtgaccagcgcacctgataccagacctgctctgggaagcaccgcccctcccgtgcacaatgtgacatctgcttccggcagcgccagcggctctgcctctacactggtgcacaacggcaccagcgccagagccacaacaaccccagccagcaagagcacccccttcagcatccctagccaccacagcgacacccctaccacactggccagccactccaccaagaccgatgcctctagcacccaccactccagcgtgccccctctgaccagcagcaaccacagcacaagcccccagctgtctaccggcgtctcattcttctttctgtccttccacatcagcaacctgcagttcaacagcagcctggaagatcccagcaccgactactaccaggaactgcagcgggatatcagcgagatgttcctgcaaatctacaagcagggcggcttcctgggcctgagcaacatcaagttcagacccggcagcgtggtggtgcagctgaccctggctttccgggaaggcaccatcaacgtgcacgacgtggaaacccagttcaaccagtacaagaccgaggccgccagccggtacaacctgaccatctccgatgtgtccgtgtccgacgtgcccttcccattctctgcccagtctggcgcaggcgtgccaggatggggaattgctctgctggtgctcgtgtgcgtgctggtggccctggccatcgtgtatctgattgccctggccgtgtgccagtgccggcggaagaattacggccagctggacatcttccccgccagagacacctaccaccccatgagcgagtaccccacataccacacccacggcagatacgtgccacccagctccaccgacagatccccctacgagaaagtgtctgccggcaacggcggcagctccctgagctacacaaatcctgccgtggccgctgcctccgccaacctg

SEQ ID NO: 7 - protein, 517 aa, Artificial Sequence
  Synthetic Construct
MASTGSGHASSTPGGEKETSATQRSSVPSSTEKNAVSMTSSVLSSHSPGSGSSTTQGQDVTLAPATEPASGSAATWGQDVTSVPVTRPALGSTTPPAHDVTSAPDNKPAPGSTAPPAHGVTSAPDTRPAPGSTAPPAHGVTSAPDTRPAPGSTAPPAHGVTSAPDTRPAPGSTAPPAHGVTSAPDTRPAPGSTAPPAHGVTSAPDTRPALGSTAPPVHNVTSASGSASGSASTLVHNGTSARATTTPASKSTPFSIPSHHSDTPTTLASHSTKTDASSTHHSSVPPLTSSNHSTSPQLSTGVSFFFLSFHISNLQFNSSLEDPSTDYYQELQRDISEMFLQIYKQGGFLGLSNIKFRPGSVVVQLTLAFREGTINVHDVETQFNQYKTEAASRYNLTISDVSVSDVPFPFSAQSGAGVPGWGIALLVLVCVLVALAIVYLIALAVCQCRRKNYGQLDIFPARDTYHPMSEYPTYHTHGRYVPPSSTDRSPYEKVSAGNGGSSLSYTNPAVAAASANL

SEQ ID NO: 8 - DNA, 2679 bp, Artificial Sequence
  Synthetic Construct
atgggagctgccccggagccggagaggacccccgttggccagggatcgtgggcccatccgggacgcaccaggggaccatccgacaggggattctgtgtggtgtcaccggccaggccagcagaagaggcaaccagcctcgagggagcgttgtctggaaccagacattcccacccgtcggtgggccggcagcaccacgcgggaccaccgtccacttccagaccgccacggccatgggacaccccttgcccgcctgtgtatgccgagactaaacacttcctgtactcatccggagacaaggaacagcttcggccgtccttcctcctgtcgtcgctcagaccgagcctgaccggagcacgcagattggtggaaactatcttccttgggtcacgtccgtggatgccaggtaccccacggcgcctcccgcgcctcccacagagatactggcagatgcggcctctgttcctggaattgctgggaaaccacgctcagtgcccgtacggagtcctgctcaagactcactgccctctgagggcggcggtcactccggcggccggagtgtgcgcacgggagaagccccagggaagcgtggcagctccggaagaggaggacaccgatccgcgccgcctcgtgcaacttctgcgccagcactcctcgccctggcaagtctacgggttcgtccgcgcctgcctgcgccgcctggtgccgcctgggctctggggttcccggcataacgagcgccgcttcctgagaaatactaagaagtttatctcacttggaaaacatgccaagttgtcgctgcaagaactcacgtggaagatgtcagtccgcgattgcgcctggctgcgccgctcgccgggcgtcgggtgtgttccagctgcagaacaccgcctgagagaagaaattctggccaaatttctgcattggctgatgtcagtgtacgtggtcgagctgctgcgctcctttttctacgtcactgagactacctttcaaaagaaccgcctgttcttctaccgcaaatctgtgtggagcaagctgcagtcaatcggcattcgccagcatctgaagagggtgcagctgcgggaactttccgaggcagaagtccgccagcaccgggaggcccggccggcgcttctcacgtcgcgtctgagattcatcccaaagcccgacgggctgaggcctatcgtcaacatggattacgtcgtgggcgctcgcacctttcgccgtgaaaagcgggccgaacgcttgacctcacgggtgaaggccctcttctccgtgctgaactacgagagagcaagacggcctggcctgctgggagcttcggtgctgggactggacgatatccaccgggcttggcggacctttgttctccgggtgagagcccaagaccctccgccggaactgtacttcgtgaaggtggcgatcaccggagcctatgatactattccgcaagatcgactcaccgaagtcatcgcctcgatcatcaaaccgcagaacacttactgcgtcaggcggtacgccgtggtccagaaggccgcgcatggccacgtgagaaaggcgttcaagtcgcacgtgtccactctcaccgacctccagccttacatgaggcaattcgttgcgcatttgcaagagacttcgcccctgagagatgcggtggtcatcgagcagagctccagcctgaacgaagcgagcagcggtctgtttgacgtgttcctccgcttcatgtgtcatcacgcggtgcgaatcaggggaaaatcatacgtgcagtgccagggaatcccacaaggcagcattctgtcgactctcttgtgttccctttgctacggcgatatggaaaacaagctgttcgctgggatcagacgggacgggttgctgctcagactggtggacgacttcctgctggtgactccgcacctcactcacgccaaaacctttctccgcactctggtgaggggagtgccagaatacggctgtgtggtcaatctccggaaaactgtggtgaatttccctgtcgaggatgaggcactcggaggaaccgcatttgtccaaatgccagcacatggcctgttcccatggtgcggtctgctgctggacacccgaactcttgaagtgcagtccgactactccagctatgcccggacgagcatccgcgccagcctcactttcaatcgcggctttaaggccggacgaaacatgcgcagaaagcttttcggagtcctccggcttaaatgccattcgctctttctcgatctccaagtcaattcgctgcagaccgtgtgcacgaacatctacaagatcctgctgctccaagcctaccggttccacgcttgcgtgcttcagctgccgtttcaccaacaggtgtggaagaacccgaccttctttctgcgggtcattagcgatactgcctccctgtgttactcaatcctcaaggcaaagaacgccggaatgtcgctgggtgcgaaaggagccgcgggacctcttcctagcgaagcggtgcagtggctctgccaccaggctttcctcctgaagctgaccaggcacagagtgacctacgtcccgctgctgggctcgctgcgcactgcacagacccagctgtctagaaaactccccggcaccaccctgaccgctctggaagccgccgccaacccagcattgccgtcagatttcaagaccatcttggac

SEQ ID NO: 9 - protein, 893 aa, Artificial Sequence
  Synthetic Construct
MGAAPEPERTPVGQGSWAHPGRTRGPSDRGFCVVSPARPAEEATSLEGALSGTRHSHPSVGRQHHAGPPSTSRPPRPWDTPCPPVYAETKHFLYSSGDKEQLRPSFLLSSLRPSLTGARRLVETIFLGSRPWMPGTPRRLPRLPQRYWQMRPLFLELLGNHAQCPYGVLLKTHCPLRAAVTPAAGVCAREKPQGSVAAPEEEDTDPRRLVQLLRQHSSPWQVYGFVRACLRRLVPPGLWGSRHNERRFLRNTKKFISLGKHAKLSLQELTWKMSVRDCAWLRRSPGVGCVPAAEHRLREEILAKFLHWLMSVYVVELLRSFFYVTETTFQKNRLFFYRKSVWSKLQSIGIRQHLKRVQLRELSEAEVRQHREARPALLTSRLRFIPKPDGLRPIVNMDYVVGARTFRREKRAERLTSRVKALFSVLNYERARRPGLLGASVLGLDDIHRAWRTFVLRVRAQDPPPELYFVKVAITGAYDTIPQDRLTEVIASIIKPQNTYCVRRYAVVQKAAHGHVRKAFKSHVSTLTDLQPYMRQFVAHLQETSPLRDAVVIEQSSSLNEASSGLFDVFLRFMCHHAVRIRGKSYVQCQGIPQGSILSTLLCSLCYGDMENKLFAGIRRDGLLLRLVDDFLLVTPHLTHAKTFLRTLVRGVPEYGCVVNLRKTVVNFPVEDEALGGTAFVQMPAHGLFPWCGLLLDTRTLEVQSDYSSYARTSIRASLTFNRGFKAGRNMRRKLFGVLRLKCHSLFLDLQVNSLQTVCTNIYKILLLQAYRFHACVLQLPFHQQVWKNPTFFLRVISDTASLCYSILKAKNAGMSLGAKGAAGPLPSEAVQWLCHQAFLLKLTRHRVTYVPLLGSLRTAQTQLSRKLPGTTLTALEAAANPALPSDFKTILD

SEQ ID NO: 10 - DNA, 2373 bp, Artificial Sequence
  Synthetic Construct
atggctagcttcctcctgtcgtcgctcagaccgagcctgaccggagcacgcagattggtggaaactatcttccttgggtcacgtccgtggatgccaggtaccccacggcgcctcccgcgcctcccacagagatactggcagatgcggcctctgttcctggaattgctgggaaaccacgctcagtgcccgtacggagtcctgctcaagactcactgccctctgagggcggcggtcactccggcggccggagtgtgcgcacgggagaagccccagggaagcgtggcagctccggaagaggaggacaccgatccgcgccgcctcgtgcaacttctgcgccagcactcctcgccctggcaagtctacgggttcgtccgcgcctgcctgcgccgcctggtgccgcctgggctctggggttcccggcataacgagcgccgcttcctgagaaatactaagaagtttatctcacttggaaaacatgccaagttgtcgctgcaagaactcacgtggaagatgtcagtccgcgattgcgcctggctgcgccgctcgccgggcgtcgggtgtgttccagctgcagaacaccgcctgagagaagaaattctggccaaatttctgcattggctgatgtcagtgtacgtggtcgagctgctgcgctcctttttctacgtcactgagactacctttcaaaagaaccgcctgttcttctaccgcaaatctgtgtggagcaagctgcagtcaatcggcattcgccagcatctgaagagggtgcagctgcgggaactttccgaggcagaagtccgccagcaccgggaggcccggccggcgcttctcacgtcgcgtctgagattcatcccaaagcccgacgggctgaggcctatcgtcaacatggattacgtcgtgggcgctcgcacctttcgccgtgaaaagcgggccgaacgcttgacctcacgggtgaaggccctcttctccgtgctgaactacgagagagcaagacggcctggcctgctgggagcttcggtgctgggactggacgatatccaccgggcttggcggacctttgttctccgggtgagagcccaagaccctccgccggaactgtacttcgtgaaggtggcgatcaccggagcctatgatactattccgcaagatcgactcaccgaagtcatcgcctcgatcatcaaaccgcagaacacttactgcgtcaggcggtacgccgtggtccagaaggccgcgcatggccacgtgagaaaggcgttcaagtcgcacgtgtccactctcaccgacctccagccttacatgaggcaattcgttgcgcatttgcaagagacttcgcccctgagagatgcggtggtcatcgagcagagctccagcctgaacgaagcgagcagcggtctgtttgacgtgttcctccgcttcatgtgtcatcacgcggtgcgaatcaggggaaaatcatacgtgcagtgccagggaatcccacaaggcagcattctgtcgactctcttgtgttccctttgctacggcgatatggaaaacaagctgttcgctgggatcagacgggacgggttgctgctcagactggtggacgacttcctgctggtgactccgcacctcactcacgccaaaacctttctccgcactctggtgaggggagtgccagaatacggctgtgtggtcaatctccggaaaactgtggtgaatttccctgtcgaggatgaggcactcggaggaaccgcatttgtccaaatgccagcacatggcctgttcccatggtgcggtctgctgctggacacccgaactcttgaagtgcagtccgactactccagctatgcccggacgagcatccgcgccagcctcactttcaatcgcggctttaaggccggacgaaacatgcgcagaaagcttttcggagtcctccggcttaaatgccattcgctctttctcgatctccaagtcaattcgctgcagaccgtgtgcacgaacatctacaagatcctgctgctccaagcctaccggttccacgcttgcgtgcttcagctgccgtttcaccaacaggtgtggaagaacccgaccttctttctgcgggtcattagcgatactgcctccctgtgttactcaatcctcaaggcaaagaacgccggaatgtcgctgggtgcgaaaggagccgcgggacctcttcctagcgaagcggtgcagtggctctgccaccaggctttcctcctgaagctgaccaggcacagagtgacctacgtcccgctgctgggctcgctgcgcactgcacagacccagctgtctagaaaactccccggcaccaccctgaccgctctggaagccgccgccaacccagcattgccgtcagatttcaagaccatcttggac

SEQ ID NO: 11 - protein, 791 aa, Artificial Sequence
  Synthetic Construct
MASFLLSSLRPSLTGARRLVETIFLGSRPWMPGTPRRLPRLPQRYWQMRPLFLELLGNHAQCPYGVLLKTHCPLRAAVTPAAGVCAREKPQGSVAAPEEEDTDPRRLVQLLRQHSSPWQVYGFVRACLRRLVPPGLWGSRHNERRFLRNTKKFISLGKHAKLSLQELTWKMSVRDCAWLRRSPGVGCVPAAEHRLREEILAKFLHWLMSVYVVELLRSFFYVTETTFQKNRLFFYRKSVWSKLQSIGIRQHLKRVQLRELSEAEVRQHREARPALLTSRLRFIPKPDGLRPIVNMDYVVGARTFRREKRAERLTSRVKALFSVLNYERARRPGLLGASVLGLDDIHRAWRTFVLRVRAQDPPPELYFVKVAITGAYDTIPQDRLTEVIASIIKPQNTYCVRRYAVVQKAAHGHVRKAFKSHVSTLTDLQPYMRQFVAHLQETSPLRDAVVIEQSSSLNEASSGLFDVFLRFMCHHAVRIRGKSYVQCQGIPQGSILSTLLCSLCYGDMENKLFAGIRRDGLLLRLVDDFLLVTPHLTHAKTFLRTLVRGVPEYGCVVNLRKTVVNFPVEDEALGGTAFVQMPAHGLFPWCGLLLDTRTLEVQSDYSSYARTSIRASLTFNRGFKAGRNMRRKLFGVLRLKCHSLFLDLQVNSLQTVCTNIYKILLLQAYRFHACVLQLPFHQQVWKNPTFFLRVISDTASLCYSILKAKNAGMSLGAKGAAGPLPSEAVQWLCHQAFLLKLTRHRVTYVPLLGSLRTAQTQLSRKLPGTTLTALEAAANPALPSDFKTILD

SEQ ID NO: 12 - DNA, 1782 bp, Artificial Sequence
  Synthetic Construct
atggctagcgccaaatttctgcattggctgatgtcagtgtacgtggtcgagctgctgcgctcctttttctacgtcactgagactacctttcaaaagaaccgcctgttcttctaccgcaaatctgtgtggagcaagctgcagtcaatcggcattcgccagcatctgaagagggtgcagctgcgggaactttccgaggcagaagtccgccagcaccgggaggcccggccggcgcttctcacgtcgcgtctgagattcatcccaaagcccgacgggctgaggcctatcgtcaacatggattacgtcgtgggcgctcgcacctttcgccgtgaaaagcgggccgaacgcttgacctcacgggtgaaggccctcttctccgtgctgaactacgagagagcaagacggcctggcctgctgggagcttcggtgctgggactggacgatatccaccgggcttggcggacctttgttctccgggtgagagcccaagaccctccgccggaactgtacttcgtgaaggtggcgatcaccggagcctatgatactattccgcaagatcgactcaccgaagtcatcgcctcgatcatcaaaccgcagaacacttactgcgtcaggcggtacgccgtggtccagaaggccgcgcatggccacgtgagaaaggcgttcaagtcgcacgtgtccactctcaccgacctccagccttacatgaggcaattcgttgcgcatttgcaagagacttcgcccctgagagatgcggtggtcatcgagcagagctccagcctgaacgaagcgagcagcggtctgtttgacgtgttcctccgcttcatgtgtcatcacgcggtgcgaatcaggggaaaatcatacgtgcagtgccagggaatcccacaaggcagcattctgtcgactctcttgtgttccctttgctacggcgatatggaaaacaagctgttcgctgggatcagacgggacgggttgctgctcagactggtggacgacttcctgctggtgactccgcacctcactcacgccaaaacctttctccgcactctggtgaggggagtgccagaatacggctgtgtggtcaatctccggaaaactgtggtgaatttccctgtcgaggatgaggcactcggaggaaccgcatttgtccaaatgccagcacatggcctgttcccatggtgcggtctgctgctggacacccgaactcttgaagtgcagtccgactactccagctatgcccggacgagcatccgcgccagcctcactttcaatcgcggctttaaggccggacgaaacatgcgcagaaagcttttcggagtcctccggcttaaatgccattcgctctttctcgatctccaagtcaattcgctgcagaccgtgtgcacgaacatctacaagatcctgctgctccaagcctaccggttccacgcttgcgtgcttcagctgccgtttcaccaacaggtgtggaagaacccgaccttctttctgcgggtcattagcgatactgcctccctgtgttactcaatcctcaaggcaaagaacgccggaatgtcgctgggtgcgaaaggagccgcgggacctcttcctagcgaagcggtgcagtggctctgccaccaggctttcctcctgaagctgaccaggcacagagtgacctacgtcccgctgctgggctcgctgcgcactgcacagacccagctgtctagaaaactccccggcaccaccctgaccgctctggaagccgccgccaacccagcattgccgtcagatttcaagaccatcttggac

SEQ ID NO: 13 - protein, 594 aa, Artificial Sequence
  Synthetic Construct
MASAKFLHWLMSVYVVELLRSFFYVTETTFQKNRLFFYRKSVWSKLQSIGIRQHLKRVQLRELSEAEVRQHREARPALLTSRLRFIPKPDGLRPIVNMDYVVGARTFRREKRAERLTSRVKALFSVLNYERARRPGLLGASVLGLDDIHRAWRTFVLRVRAQDPPPELYFVKVAITGAYDTIPQDRLTEVIASIIKPQNTYCVRRYAVVQKAAHGHVRKAFKSHVSTLTDLQPYMRQFVAHLQETSPLRDAVVIEQSSSLNEASSGLFDVFLRFMCHHAVRIRGKSYVQCQGIPQGSILSTLLCSLCYGDMENKLFAGIRRDGLLLRLVDDFLLVTPHLTHAKTFLRTLVRGVPEYGCVVNLRKTVVNFPVEDEALGGTAFVQMPAHGLFPWCGLLLDTRTLEVQSDYSSYARTSIRASLTFNRGFKAGRNMRRKLFGVLRLKCHSLFLDLQVNSLQTVCTNIYKILLLQAYRFHACVLQLPFHQQVWKNPTFFLRVISDTASLCYSILKAKNAGMSLGAKGAAGPLPSEAVQWLCHQAFLLKLTRHRVTYVPLLGSLRTAQTQLSRKLPGTTLTALEAAANPALPSDFKTILD

SEQ ID NO: 14 - DNA, 2112 bp, Artificial Sequence
  Synthetic Construct
atggctagcgaatcgccaagcgcaccccctcatcggtggtgcatcccttggcaacgcctcctcctgaccgcctcactgctgactttctggaacccgccgaccaccgcaaagctgaccattgagagcactcccttcaacgtggctgaggggaaggaggtgctgctcctggtgcacaatctgccccagcacctgttcgggtactcctggtacaagggagaacgcgtggacgggaaccggcagatcataggctacgtcatcggaacccagcaggccacacccggtccagcgtacagcggccgggagattatctacccgaacgcctccctgctgatccaaaacatcatccagaacgacaccggtttctacactctgcacgtgattaagtcagatctggtcaacgaagaggccaccggccaattcagggtgtaccccgaactcccaaagccgtccatttcaagcaacaactccaagccggtggaggacaaagacgccgtggccttcacttgtgaacctgaaacccaggacgccacttacctttggtgggtgaacaaccagtcgctccccgtgtcgccgaggctgcagctcagcaacggaaacagaacgctgaccctcttcaatgtgacccgcaatgataccgcctcctataagtgcgaaacccagaatccggtgtccgcccggcgctcggatagcgtgattctgaacgtgctctacggccctgacgcccccactatctcccctctgaacacttcctaccggtccggagagaacctgaacctgagctgccacgcggcgtccaacccgcccgcccagtacagctggttcgtgaatgggacgttccagcagtccacccaggagctgtttatccctaacattaccgtcaacaactctggatcgtacacatgccaagcgcataactcggacactgggcttaacagaaccaccgtgacaaccatcactgtgtatgcggaacctcctaagccgttcatcacctcgaacaacagcaacccggtcgaggatgaagatgcggtggccttgacgtgcgaacctgagatccagaacaccacctacttgtggtgggtgaacaatcagagcctgccagtctccccacgactccagctgtcgaacgacaacaggaccctgactttgctgtccgtgactcggaacgacgtgggcccttatgaatgcggtatccagaacaagctgtccgtggaccacagcgaccctgtgatcctgaacgtcctttacgggccggacgaccccaccatttccccgtcgtacacttactaccggccgggcgtgaacctgtccctgtcgtgccacgctgcctccaatccgccggcccagtactcctggctcatcgacggaaacatccagcagcacacccaagaactgttcatctccaacattaccgagaaaaactcgggactttacacctgtcaagccaacaattccgccagcggccactcccgcaccactgtcaaaactatcactgtgtccgccgaactcccgaagcccagcatcagctccaacaactcgaagcccgtggaggataaggacgctgtcgcgttcacctgtgaaccagaggcacagaataccacctacctttggtgggtcaacggacagtccctgcctgtctcaccgagactgcagctgtcaaacgggaataggactctgaccttgtttaacgtcacccggaacgacgcccgggcctacgtgtgcggcatccagaactccgtgagcgcaaaccggtctgacccagtgaccctggatgtgctgtacggccccgacactccgatcatttcaccccccgattcatcctacctgtccggcgctaacctcaacctctcatgccactccgcatccaaccccagcccgcaatattcgtggcgcattaacggaattcctcagcaacatacccaggtcctgttcattgcgaagatcacccctaacaacaacggaacctacgcctgctttgtgtcaaacctggccactggtagaaacaactccatcgtgaagtccattaccgtgtcggcgtccggaacttccccgggcctgagcgccggcgccaccgtgggaattatgatcggcgtgctcgtgggagtggccctgatc

SEQ ID NO: 15 - protein, 704 aa, Artificial Sequence
  Synthetic Construct
MASESPSAPPHRWCIPWQRLLLTASLLTFWNPPTTAKLTIESTPFNVAEGKEVLLLVHNLPQHLFGYSWYKGERVDGNRQIIGYVIGTQQATPGPAYSGREIIYPNASLLIQNIIQNDTGFYTLHVIKSDLVNEEATGQFRVYPELPKPSISSNNSKPVEDKDAVAFTCEPETQDATYLWWVNNQSLPVSPRLQLSNGNRTLTLFNVTRNDTASYKCETQNPVSARRSDSVILNVLYGPDAPTISPLNTSYRSGENLNLSCHAASNPPAQYSWFVNGTFQQSTQELFIPNITVNNSGSYTCQAHNSDTGLNRTTVTTITVYAEPPKPFITSNNSNPVEDEDAVALTCEPEIQNTTYLWWVNNQSLPVSPRLQLSNDNRTLTLLSVTRNDVGPYECGIQNKLSVDHSDPVILNVLYGPDDPTISPSYTYYRPGVNLSLSCHAASNPPAQYSWLIDGNIQQHTQELFISNITEKNSGLYTCQANNSASGHSRTTVKTITVSAELPKPSISSNNSKPVEDKDAVAFTCEPEAQNTTYLWWVNGQSLPVSPRLQLSNGNRTLTLFNVTRNDARAYVCGIQNSVSANRSDPVTLDVLYGPDTPIISPPDSSYLSGANLNLSCHSASNPSPQYSWRINGIPQQHTQVLFIAKITPNNNGTYACFVSNLATGRNNSIVKSITVSASGTSPGLSAGATVGIMIGVLVGVALI

SEQ ID NO: 16 - DNA, 1578 bp, Artificial Sequence
  Synthetic Construct
atggctagcgaatcgccaagcgcaccccctcatcggtggtgcatcccttggcaacgcctcctcctgaccgcctcactgctgactttctggaacccgccgaccaccgcaaagctgaccattgagagcactcccttcaacgtggctgaggggaaggaggtgctgctcctggtgcacaatctgccccagcacctgttcgggtactcctggtacaagggagaacgcgtggacgggaaccggcagatcataggctacgtcatcggaacccagcaggccacacccggtccagcgtacagcggccgggagattatctacccgaacgcctccctgctgatccaaaacatcatccagaacgacaccggtttctacactctgcacgtgattaagtcagatctggtcaacgaagaggccaccggccaattcagggtgtaccccgaactccctaagccgttcatcacctcgaacaacagcaacccggtcgaggatgaagatgcggtggccttgacgtgcgaacctgagatccagaacaccacctacttgtggtgggtgaacaatcagagcctgccagtctccccacgactccagctgtcgaacgacaacaggaccctgactttgctgtccgtgactcggaacgacgtgggcccttatgaatgcggtatccagaacaagctgtccgtggaccacagcgaccctgtgatcctgaacgtcctttacgggccggacgaccccaccatttccccgtcgtacacttactaccggccgggcgtgaacctgtccctgtcgtgccacgctgcctccaatccgccggcccagtactcctggctcatcgacggaaacatccagcagcacacccaagaactgttcatctccaacattaccgagaaaaactcgggactttacacctgtcaagccaacaattccgccagcggccactcccgcaccactgtcaaaactatcactgtgtccgccgaactcccgaagcccagcatcagctccaacaactcgaagcccgtggaggataaggacgctgtcgcgttcacctgtgaaccagaggcacagaataccacctacctttggtgggtcaacggacagtccctgcctgtctcaccgagactgcagctgtcaaacgggaataggactctgaccttgtttaacgtcacccggaacgacgcccgggcctacgtgtgcggcatccagaactccgtgagcgcaaaccggtctgacccagtgaccctggatgtgctgtacggccccgacactccgatcatttcaccccccgattcatcctacctgtccggcgctaacctcaacctctcatgccactccgcatccaaccccagcccgcaatattcgtggcgcattaacggaattcctcagcaacatacccaggtcctgttcattgcgaagatcacccctaacaacaacggaacctacgcctgctttgtgtcaaacctggccactggtagaaacaactccatcgtgaagtccattaccgtgtcggcgtccggaacttccccgggcctgagcgccggcgccaccgtgggaattatgatcggcgtgctcgtgggagtggccctgatc

SEQ ID NO: 17 - protein, 526 aa, Artificial Sequence
  Synthetic Construct
MASESPSAPPHRWCIPWQRLLLTASLLTFWNPPTTAKLTIESTPFNVAEGKEVLLLVHNLPQHLFGYSWYKGERVDGNRQIIGYVIGTQQATPGPAYSGREIIYPNASLLIQNIIQNDTGFYTLHVIKSDLVNEEATGQFRVYPELPKPFITSNNSNPVEDEDAVALTCEPEIQNTTYLWWVNNQSLPVSPRLQLSNDNRTLTLLSVTRNDVGPYECGIQNKLSVDHSDPVILNVLYGPDDPTISPSYTYYRPGVNLSLSCHAASNPPAQYSWLIDGNIQQHTQELFISNITEKNSGLYTCQANNSASGHSRTTVKTITVSAELPKPSISSNNSKPVEDKDAVAFTCEPEAQNTTYLWWVNGQSLPVSPRLQLSNGNRTLTLFNVTRNDARAYVCGIQNSVSANRSDPVTLDVLYGPDTPIISPPDSSYLSGANLNLSCHSASNPSPQYSWRINGIPQQHTQVLFIAKITPNNNGTYACFVSNLATGRNNSIVKSITVSASGTSPGLSAGATVGIMIGVLVGVALI

SEQ ID NO: 18 - DNA, 1404 bp, Artificial Sequence
  Synthetic Construct
atggctagcaagctgaccattgagagcactcccttcaacgtggctgaggggaaggaggtgctgctcctggtgcacaatctgccccagcacctgttcgggtactcctggtacaagggagaacgcgtggacgggaaccggcagatcataggctacgtcatcggaacccagcaggccacacccggtccagcgtacagcggccgggagattatctacccgaacgcctccctgctgatccaaaacatcatccagaacgacaccggtttctacactctgcacgtgattaagtcagatctggtcaacgaagaggccaccggccaattcagggtgtaccccgaactccctaagccgttcatcacctcgaacaacagcaacccggtcgaggatgaagatgcggtggccttgacgtgcgaacctgagatccagaacaccacctacttgtggtgggtgaacaatcagagcctgccagtctccccacgactccagctgtcgaacgacaacaggaccctgactttgctgtccgtgactcggaacgacgtgggcccttatgaatgcggtatccagaacaagctgtccgtggaccacagcgaccctgtgatcctgaacgtcctttacgggccggacgaccccaccatttccccgtcgtacacttactaccggccgggcgtgaacctgtccctgtcgtgccacgctgcctccaatccgccggcccagtactcctggctcatcgacggaaacatccagcagcacacccaagaactgttcatctccaacattaccgagaaaaactcgggactttacacctgtcaagccaacaattccgccagcggccactcccgcaccactgtcaaaactatcactgtgtccgccgaactcccgaagcccagcatcagctccaacaactcgaagcccgtggaggataaggacgctgtcgcgttcacctgtgaaccagaggcacagaataccacctacctttggtgggtcaacggacagtccctgcctgtctcaccgagactgcagctgtcaaacgggaataggactctgaccttgtttaacgtcacccggaacgacgcccgggcctacgtgtgcggcatccagaactccgtgagcgcaaaccggtctgacccagtgaccctggatgtgctgtacggccccgacactccgatcatttcaccccccgattcatcctacctgtccggcgctaacctcaacctctcatgccactccgcatccaaccccagcccgcaatattcgtggcgcattaacggaattcctcagcaacatacccaggtcctgttcattgcgaagatcacccctaacaacaacggaacctacgcctgctttgtgtcaaacctggccactggtagaaacaactccatcgtgaagtccattaccgtgtcggcgtcc

SEQ ID NO: 19 - protein, 468 aa, Artificial Sequence
  Synthetic Construct
MASKLTIESTPFNVAEGKEVLLLVHNLPQHLFGYSWYKGERVDGNRQIIGYVIGTQQATPGPAYSGREIIYPNASLLIQNIIQNDTGFYTLHVIKSDLVNEEATGQFRVYPELPKPFITSNNSNPVEDEDAVALTCEPEIQNTTYLWWVNNQSLPVSPRLQLSNDNRTLTLLSVTRNDVGPYECGIQNKLSVDHSDPVILNVLYGPDDPTISPSYTYYRPGVNLSLSCHAASNPPAQYSWLIDGNIQQHTQELFISNITEKNSGLYTCQANNSASGHSRTTVKTITVSAELPKPSISSNNSKPVEDKDAVAFTCEPEAQNTTYLWWVNGQSLPVSPRLQLSNGNRTLTLFNVTRNDARAYVCGIQNSVSANRSDPVTLDVLYGPDTPIISPPDSSYLSGANLNLSCHSASNPSPQYSWRINGIPQQHTQVLFIAKITPNNNGTYACFVSNLATGRNNSIVKSITVSAS

SEQ ID NO: 20 - DNA, 4302 bp, Artificial Sequence
  Synthetic Construct
atggctagcacccctggaacccagagccccttcttccttctgctgctgctgaccgtgctgactgtcgtgacaggctctggccacgccagctctacacctggcggcgagaaagagacaagcgccacccagagaagcagcgtgccaagcagcaccgagaagaacgccgtgtccatgaccagctccgtgctgagcagccactctcctggcagcggcagcagcacaacacagggccaggatgtgacactggcccctgccacagaacctgcctctggatctgccgccacctggggacaggacgtgacaagcgtgccagtgaccagacctgccctgggctctacaacaccccctgcccacgatgtgaccagcgcccctgataacaagcctgcccctggaagcacagcccctccagctcatggcgtgacctctgccccagataccagaccagccccaggatctacagccccacccgcacacggcgtgacaagtgcccctgacacaagacccgctccaggctctactgctcctcctgcccatggcgtgacaagcgctcccgatacaaggccagctcctggctccacagcaccaccagcacatggcgtgacatcagctcccgacactagacctgctcccggatcaaccgctccaccagctcacggcgtgaccagcgcacctgataccagacctgctctgggaagcaccgcccctcccgtgcacaatgtgacatctgcttccggcagcgccagcggctctgcctctacactggtgcacaacggcaccagcgccagagccacaacaaccccagccagcaagagcacccccttcagcatccctagccaccacagcgacacccctaccacactggccagccactccaccaagaccgatgcctctagcacccaccactccagcgtgccccctctgaccagcagcaaccacagcacaagcccccagctgtctaccggcgtctcattcttctttctgtccttccacatcagcaacctgcagttcaacagcagcctggaagatcccagcaccgactactaccaggaactgcagcgggatatcagcgagatgttcctgcaaatctacaagcagggcggcttcctgggcctgagcaacatcaagttcagacccggcagcgtggtggtgcagctgaccctggctttccgggaaggcaccatcaacgtgcacgacgtggaaacccagttcaaccagtacaagaccgaggccgccagccggtacaacctgaccatctccgatgtgtccgtgtccgacgtgcccttcccattctctgcccagtctggcgcaggcgtgccaggatggggaattgctctgctggtgctcgtgtgcgtgctggtggccctggccatcgtgtatctgattgccctggccgtgtgccagtgccggcggaagaattacggccagctggacatcttccccgccagagacacctaccaccccatgagcgagtaccccacataccacacccacggcagatacgtgccacccagctccaccgacagatccccctacgagaaagtgtctgccggcaacggcggcagctccctgagctacacaaatcctgccgtggccgctgcctccgccaacctgggaggctccggcggaggagctgccccggagccggagaggacccccgttggccagggatcgtgggcccatccgggacgcaccaggggaccatccgacaggggattctgtgtggtgtcaccggccaggccagcagaagaggcaaccagcctcgagggagcgttgtctggaaccagacattcccacccgtcggtgggccggcagcaccacgcgggaccaccgtccacttccagaccgccacggccatgggacaccccttgcccgcctgtgtatgccgagactaaacacttcctgtactcatccggagacaaggaacagcttcggccgtccttcctcctgtcgtcgctcagaccgagcctgaccggagcacgcagattggtggaaactatcttccttgggtcacgtccgtggatgccaggtaccccacggcgcctcccgcgcctcccacagagatactggcagatgcggcctctgttcctggaattgctgggaaaccacgctcagtgcccgtacggagtcctgctcaagactcactgccctctgagggcggcggtcactccggcggccggagtgtgcgcacgggagaagccccagggaagcgtggcagctccggaagaggaggacaccgatccgcgccgcctcgtgcaacttctgcgccagcactcctcgccctggcaagtctacgggttcgtccgcgcctgcctgcgccgcctggtgccgcctgggctctggggttcccggcataacgagcgccgcttcctgagaaatactaagaagtttatctcacttggaaaacatgccaagttgtcgctgcaagaactcacgtggaagatgtcagtccgcgattgcgcctggctgcgccgctcgccgggcgtcgggtgtgttccagctgcagaacaccgcctgagagaagaaattctggccaaatttctgcattggctgatgtcagtgtacgtggtcgagctgctgcgctcctttttctacgtcactgagactacctttcaaaagaaccgcctgttcttctaccgcaaatctgtgtggagcaagctgcagtcaatcggcattcgccagcatctgaagagggtgcagctgcgggaactttccgaggcagaagtccgccagcaccgggaggcccggccggcgcttctcacgtcgcgtctgagattcatcccaaagcccgacgggctgaggcctatcgtcaacatggattacgtcgtgggcgctcgcacctttcgccgtgaaaagcgggccgaacgcttgacctcacgggtgaaggccctcttctccgtgctgaactacgagagagcaagacggcctggcctgctgggagcttcggtgctgggactggacgatatccaccgggcttggcggacctttgttctccgggtgagagcccaagaccctccgccggaactgtacttcgtgaaggtggcgatcaccggagcctatgatactattccgcaagatcgactcaccgaagtcatcgcctcgatcatcaaaccgcagaacacttactgcgtcaggcggtacgccgtggtccagaaggccgcgcatggccacgtgagaaaggcgttcaagtcgcacgtgtccactctcaccgacctccagccttacatgaggcaattcgttgcgcatttgcaagagacttcgcccctgagagatgcggtggtcatcgagcagagctccagcctgaacgaagcgagcagcggtctgtttgacgtgttcctccgcttcatgtgtcatcacgcggtgcgaatcaggggaaaatcatacgtgcagtgccagggaatcccacaaggcagcattctgtcgactctcttgtgttccctttgctacggcgatatggaaaacaagctgttcgctgggatcagacgggacgggttgctgctcagactggtggacgacttcctgctggtgactccgcacctcactcacgccaaaacctttctccgcactctggtgaggggagtgccagaatacggctgtgtggtcaatctccggaaaactgtggtgaatttccctgtcgaggatgaggcactcggaggaaccgcatttgtccaaatgccagcacatggcctgttcccatggtgcggtctgctgctggacacccgaactcttgaagtgcagtccgactactccagctatgcccggacgagcatccgcgccagcctcactttcaatcgcggctttaaggccggacgaaacatgcgcagaaagcttttcggagtcctccggcttaaatgccattcgctctttctcgatctccaagtcaattcgctgcagaccgtgtgcacgaacatctacaagatcctgctgctccaagcctaccggttccacgcttgcgtgcttcagctgccgtttcaccaacaggtgtggaagaacccgaccttctttctgcgggtcattagcgatactgcctccctgtgttactcaatcctcaaggcaaagaacgccggaatgtcgctgggtgcgaaaggagccgcgggacctcttcctagcgaagcggtgcagtggctctgccaccaggctttcctcctgaagctgaccaggcacagagtgacctacgtcccgctgctgggctcgctgcgcactgcacagacccagctgtctagaaaactccccggcaccaccctgaccgctctggaagccgccgccaacccagcattgccgtcagatttcaagaccatcttggac

SEQ ID NO: 21 - protein, 1434 aa, Artificial Sequence
  Synthetic Construct
MASTPGTQSPFFLLLLLTVLTVVTGSGHASSTPGGEKETSATQRSSVPSSTEKNAVSMTSSVLSSHSPGSGSSTTQGQDVTLAPATEPASGSAATWGQDVTSVPVTRPALGSTTPPAHDVTSAPDNKPAPGSTAPPAHGVTSAPDTRPAPGSTAPPAHGVTSAPDTRPAPGSTAPPAHGVTSAPDTRPAPGSTAPPAHGVTSAPDTRPAPGSTAPPAHGVTSAPDTRPALGSTAPPVHNVTSASGSASGSASTLVHNGTSARATTTPASKSTPFSIPSHHSDTPTTLASHSTKTDASSTHHSSVPPLTSSNHSTSPQLSTGVSFFFLSFHISNLQFNSSLEDPSTDYYQELQRDISEMFLQIYKQGGFLGLSNIKFRPGSVVVQLTLAFREGTINVHDVETQFNQYKTEAASRYNLTISDVSVSDVPFPFSAQSGAGVPGWGIALLVLVCVLVALAIVYLIALAVCQCRRKNYGQLDIFPARDTYHPMSEYPTYHTHGRYVPPSSTDRSPYEKVSAGNGGSSLSYTNPAVAAASANLGGSGGGAAPEPERTPVGQGSWAHPGRTRGPSDRGFCVVSPARPAEEATSLEGALSGTRHSHPSVGRQHHAGPPSTSRPPRPWDTPCPPVYAETKHFLYSSGDKEQLRPSFLLSSLRPSLTGARRLVETIFLGSRPWMPGTPRRLPRLPQRYWQMRPLFLELLGNHAQCPYGVLLKTHCPLRAAVTPAAGVCAREKPQGSVAAPEEEDTDPRRLVQLLRQHSSPWQVYGFVRACLRRLVPPGLWGSRHNERRFLRNTKKFISLGKHAKLSLQELTWKMSVRDCAWLRRSPGVGCVPAAEHRLREEILAKFLHWLMSVYVVELLRSFFYVTETTFQKNRLFFYRKSVWSKLQSIGIRQHLKRVQLRELSEAEVRQHREARPALLTSRLRFIPKPDGLRPIVNMDYVVGARTFRREKRAERLTSRVKALFSVLNYERARRPGLLGASVLGLDDIHRAWRTFVLRVRAQDPPPELYFVKVAITGAYDTIPQDRLTEVIASIIKPQNTYCVRRYAVVQKAAHGHVRKAFKSHVSTLTDLQPYMRQFVAHLQETSPLRDAVVIEQSSSLNEASSGLFDVFLRFMCHHAVRIRGKSYVQCQGIPQGSILSTLLCSLCYGDMENKLFAGIRRDGLLLRLVDDFLLVTPHLTHAKTFLRTLVRGVPEYGCVVNLRKTVVNFPVEDEALGGTAFVQMPAHGLFPWCGLLLDTRTLEVQSDYSSYARTSIRASLTFNRGFKAGRNMRRKLFGVLRLKCHSLFLDLQVNSLQTVCTNIYKILLLQAYRFHACVLQLPFHQQVWKNPTFFLRVISDTASLCYSILKAKNAGMSLGAKGAAGPLPSEAVQWLCHQAFLLKLTRHRVTYVPLLGSLRTAQTQLSRKLPGTTLTALEAAANPALPSDFKTILD

SEQ ID NO: 22 - DNA, 4371 bp, Artificial Sequence
  Synthetic Construct
atggctagcacccctggaacccagagccccttcttccttctgctgctgctgaccgtgctgactgtcgtgacaggctctggccacgccagctctacacctggcggcgagaaagagacaagcgccacccagagaagcagcgtgccaagcagcaccgagaagaacgccgtgtccatgaccagctccgtgctgagcagccactctcctggcagcggcagcagcacaacacagggccaggatgtgacactggcccctgccacagaacctgcctctggatctgccgccacctggggacaggacgtgacaagcgtgccagtgaccagacctgccctgggctctacaacaccccctgcccacgatgtgaccagcgcccctgataacaagcctgcccctggaagcacagcccctccagctcatggcgtgacctctgccccagataccagaccagccccaggatctacagccccacccgcacacggcgtgacaagtgcccctgacacaagacccgctccaggctctactgctcctcctgcccatggcgtgacaagcgctcccgatacaaggccagctcctggctccacagcaccaccagcacatggcgtgacatcagctcccgacactagacctgctcccggatcaaccgctccaccagctcacggcgtgaccagcgcacctgataccagacctgctctgggaagcaccgcccctcccgtgcacaatgtgacatctgcttccggcagcgccagcggctctgcctctacactggtgcacaacggcaccagcgccagagccacaacaaccccagccagcaagagcacccccttcagcatccctagccaccacagcgacacccctaccacactggccagccactccaccaagaccgatgcctctagcacccaccactccagcgtgccccctctgaccagcagcaaccacagcacaagcccccagctgtctaccggcgtctcattcttctttctgtccttccacatcagcaacctgcagttcaacagcagcctggaagatcccagcaccgactactaccaggaactgcagcgggatatcagcgagatgttcctgcaaatctacaagcagggcggcttcctgggcctgagcaacatcaagttcagacccggcagcgtggtggtgcagctgaccctggctttccgggaaggcaccatcaacgtgcacgacgtggaaacccagttcaaccagtacaagaccgaggccgccagccggtacaacctgaccatctccgatgtgtccgtgtccgacgtgcccttcccattctctgcccagtctggcgcaggcgtgccaggatggggaattgctctgctggtgctcgtgtgcgtgctggtggccctggccatcgtgtatctgattgccctggccgtgtgccagtgccggcggaagaattacggccagctggacatcttccccgccagagacacctaccaccccatgagcgagtaccccacataccacacccacggcagatacgtgccacccagctccaccgacagatccccctacgagaaagtgtctgccggcaacggcggcagctccctgagctacacaaatcctgccgtggccgctgcctccgccaacctgggatccggcacaatcctgtctgagggcgccaccaacttcagcctgctgaaactggccggcgacgtggaactgaaccctggccctggagctgccccggagccggagaggacccccgttggccagggatcgtgggcccatccgggacgcaccaggggaccatccgacaggggattctgtgtggtgtcaccggccaggccagcagaagaggcaaccagcctcgagggagcgttgtctggaaccagacattcccacccgtcggtgggccggcagcaccacgcgggaccaccgtccacttccagaccgccacggccatgggacaccccttgcccgcctgtgtatgccgagactaaacacttcctgtactcatccggagacaaggaacagcttcggccgtccttcctcctgtcgtcgctcagaccgagcctgaccggagcacgcagattggtggaaactatcttccttgggtcacgtccgtggatgccaggtaccccacggcgcctcccgcgcctcccacagagatactggcagatgcggcctctgttcctggaattgctgggaaaccacgctcagtgcccgtacggagtcctgctcaagactcactgccctctgagggcggcggtcactccggcggccggagtgtgcgcacgggagaagccccagggaagcgtggcagctccggaagaggaggacaccgatccgcgccgcctcgtgcaacttctgcgccagcactcctcgccctggcaagtctacgggttcgtccgcgcctgcctgcgccgcctggtgccgcctgggctctggggttcccggcataacgagcgccgcttcctgagaaatactaagaagtttatctcacttggaaaacatgccaagttgtcgctgcaagaactcacgtggaagatgtcagtccgcgattgcgcctggctgcgccgctcgccgggcgtcgggtgtgttccagctgcagaacaccgcctgagagaagaaattctggccaaatttctgcattggctgatgtcagtgtacgtggtcgagctgctgcgctcctttttctacgtcactgagactacctttcaaaagaaccgcctgttcttctaccgcaaatctgtgtggagcaagctgcagtcaatcggcattcgccagcatctgaagagggtgcagctgcgggaactttccgaggcagaagtccgccagcaccgggaggcccggccggcgcttctcacgtcgcgtctgagattcatcccaaagcccgacgggctgaggcctatcgtcaacatggattacgtcgtgggcgctcgcacctttcgccgtgaaaagcgggccgaacgcttgacctcacgggtgaaggccctcttctccgtgctgaactacgagagagcaagacggcctggcctgctgggagcttcggtgctgggactggacgatatccaccgggcttggcggacctttgttctccgggtgagagcccaagaccctccgccggaactgtacttcgtgaaggtggcgatcaccggagcctatgatactattccgcaagatcgactcaccgaagtcatcgcctcgatcatcaaaccgcagaacacttactgcgtcaggcggtacgccgtggtccagaaggccgcgcatggccacgtgagaaaggcgttcaagtcgcacgtgtccactctcaccgacctccagccttacatgaggcaattcgttgcgcatttgcaagagacttcgcccctgagagatgcggtggtcatcgagcagagctccagcctgaacgaagcgagcagcggtctgtttgacgtgttcctccgcttcatgtgtcatcacgcggtgcgaatcaggggaaaatcatacgtgcagtgccagggaatcccacaaggcagcattctgtcgactctcttgtgttccctttgctacggcgatatggaaaacaagctgttcgctgggatcagacgggacgggttgctgctcagactggtggacgacttcctgctggtgactccgcacctcactcacgccaaaacctttctccgcactctggtgaggggagtgccagaatacggctgtgtggtcaatctccggaaaactgtggtgaatttccctgtcgaggatgaggcactcggaggaaccgcatttgtccaaatgccagcacatggcctgttcccatggtgcggtctgctgctggacacccgaactcttgaagtgcagtccgactactccagctatgcccggacgagcatccgcgccagcctcactttcaatcgcggctttaaggccggacgaaacatgcgcagaaagcttttcggagtcctccggcttaaatgccattcgctctttctcgatctccaagtcaattcgctgcagaccgtgtgcacgaacatctacaagatcctgctgctccaagcctaccggttccacgcttgcgtgcttcagctgccgtttcaccaacaggtgtggaagaacccgaccttctttctgcgggtcattagcgatactgcctccctgtgttactcaatcctcaaggcaaagaacgccggaatgtcgctgggtgcgaaaggagccgcgggacctcttcctagcgaagcggtgcagtggctctgccaccaggctttcctcctgaagctgaccaggcacagagtgacctacgtcccgctgctgggctcgctgcgcactgcacagacccagctgtctagaaaactccccggcaccaccctgaccgctctggaagccgccgccaacccagcattgccgtcagatttcaagaccatcttggac

SEQ ID NO: 23 - protein, 1457 aa, Artificial Sequence
  Synthetic Construct
MASTPGTQSPFFLLLLLTVLTVVTGSGHASSTPGGEKETSATQRSSVPSSTEKNAVSMTSSVLSSHSPGSGSSTTQGQDVTLAPATEPASGSAATWGQDVTSVPVTRPALGSTTPPAHDVTSAPDNKPAPGSTAPPAHGVTSAPDTRPAPGSTAPPAHGVTSAPDTRPAPGSTAPPAHGVTSAPDTRPAPGSTAPPAHGVTSAPDTRPAPGSTAPPAHGVTSAPDTRPALGSTAPPVHNVTSASGSASGSASTLVHNGTSARATTTPASKSTPFSIPSHHSDTPTTLASHSTKTDASSTHHSSVPPLTSSNHSTSPQLSTGVSFFFLSFHISNLQFNSSLEDPSTDYYQELQRDISEMFLQIYKQGGFLGLSNIKFRPGSVVVQLTLAFREGTINVHDVETQFNQYKTEAASRYNLTISDVSVSDVPFPFSAQSGAGVPGWGIALLVLVCVLVALAIVYLIALAVCQCRRKNYGQLDIFPARDTYHPMSEYPTYHTHGRYVPPSSTDRSPYEKVSAGNGGSSLSYTNPAVAAASANLGSGTILSEGATNFSLLKLAGDVELNPGPGAAPEPERTPVGQGSWAHPGRTRGPSDRGFCVVSPARPAEEATSLEGALSGTRHSHPSVGRQHHAGPPSTSRPPRPWDTPCPPVYAETKHFLYSSGDKEQLRPSFLLSSLRPSLTGARRLVETIFLGSRPWMPGTPRRLPRLPQRYWQMRPLFLELLGNHAQCPYGVLLKTHCPLRAAVTPAAGVCAREKPQGSVAAPEEEDTDPRRLVQLLRQHSSPWQVYGFVRACLRRLVPPGLWGSRHNERRFLRNTKKFISLGKHAKLSLQELTWKMSVRDCAWLRRSPGVGCVPAAEHRLREEILAKFLHWLMSVYVVELLRSFFYVTETTFQKNRLFFYRKSVWSKLQSIGIRQHLKRVQLRELSEAEVRQHREARPALLTSRLRFIPKPDGLRPIVNMDYVVGARTFRREKRAERLTSRVKALFSVLNYERARRPGLLGASVLGLDDIHRAWRTFVLRVRAQDPPPELYFVKVAITGAYDTIPQDRLTEVIASIIKPQNTYCVRRYAVVQKAAHGHVRKAFKSHVSTLTDLQPYMRQFVAHLQETSPLRDAVVIEQSSSLNEASSGLFDVFLRFMCHHAVRIRGKSYVQCQGIPQGSILSTLLCSLCYGDMENKLFAGIRRDGLLLRLVDDFLLVTPHLTHAKTFLRTLVRGVPEYGCVVNLRKTVVNFPVEDEALGGTAFVQMPAHGLFPWCGLLLDTRTLEVQSDYSSYARTSIRASLTFNRGFKAGRNMRRKLFGVLRLKCHSLFLDLQVNSLQTVCTNIYKILLLQAYRFHACVLQLPFHQQVWKNPTFFLRVISDTASLCYSILKAKNAGMSLGAKGAAGPLPSEAVQWLCHQAFLLKLTRHRVTYVPLLGSLRTAQTQLSRKLPGTTLTALEAAANPALPSDFKTILD

SEQ ID NO: 24 - DNA, 4371 bp, Artificial Sequence
  Synthetic Construct
atggctagcggagctgccccggagccggagaggacccccgttggccagggatcgtgggcccatccgggacgcaccaggggaccatccgacaggggattctgtgtggtgtcaccggccaggccagcagaagaggcaaccagcctcgagggagcgttgtctggaaccagacattcccacccgtcggtgggccggcagcaccacgcgggaccaccgtccacttccagaccgccacggccatgggacaccccttgcccgcctgtgtatgccgagactaaacacttcctgtactcatccggagacaaggaacagcttcggccgtccttcctcctgtcgtcgctcagaccgagcctgaccggagcacgcagattggtggaaactatcttccttgggtcacgtccgtggatgccaggtaccccacggcgcctcccgcgcctcccacagagatactggcagatgcggcctctgttcctggaattgctgggaaaccacgctcagtgcccgtacggagtcctgctcaagactcactgccctctgagggcggcggtcactccggcggccggagtgtgcgcacgggagaagccccagggaagcgtggcagctccggaagaggaggacaccgatccgcgccgcctcgtgcaacttctgcgccagcactcctcgccctggcaagtctacgggttcgtccgcgcctgcctgcgccgcctggtgccgcctgggctctggggttcccggcataacgagcgccgcttcctgagaaatactaagaagtttatctcacttggaaaacatgccaagttgtcgctgcaagaactcacgtggaagatgtcagtccgcgattgcgcctggctgcgccgctcgccgggcgtcgggtgtgttccagctgcagaacaccgcctgagagaagaaattctggccaaatttctgcattggctgatgtcagtgtacgtggtcgagctgctgcgctcctttttctacgtcactgagactacctttcaaaagaaccgcctgttcttctaccgcaaatctgtgtggagcaagctgcagtcaatcggcattcgccagcatctgaagagggtgcagctgcgggaactttccgaggcagaagtccgccagcaccgggaggcccggccggcgcttctcacgtcgcgtctgagattcatcccaaagcccgacgggctgaggcctatcgtcaacatggattacgtcgtgggcgctcgcacctttcgccgtgaaaagcgggccgaacgcttgacctcacgggtgaaggccctcttctccgtgctgaactacgagagagcaagacggcctggcctgctgggagcttcggtgctgggactggacgatatccaccgggcttggcggacctttgttctccgggtgagagcccaagaccctccgccggaactgtacttcgtgaaggtggcgatcaccggagcctatgatactattccgcaagatcgactcaccgaagtcatcgcctcgatcatcaaaccgcagaacacttactgcgtcaggcggtacgccgtggtccagaaggccgcgcatggccacgtgagaaaggcgttcaagtcgcacgtgtccactctcaccgacctccagccttacatgaggcaattcgttgcgcatttgcaagagacttcgcccctgagagatgcggtggtcatcgagcagagctccagcctgaacgaagcgagcagcggtctgtttgacgtgttcctccgcttcatgtgtcatcacgcggtgcgaatcaggggaaaatcatacgtgcagtgccagggaatcccacaaggcagcattctgtcgactctcttgtgttccctttgctacggcgatatggaaaacaagctgttcgctgggatcagacgggacgggttgctgctcagactggtggacgacttcctgctggtgactccgcacctcactcacgccaaaacctttctccgcactctggtgaggggagtgccagaatacggctgtgtggtcaatctccggaaaactgtggtgaatttccctgtcgaggatgaggcactcggaggaaccgcatttgtccaaatgccagcacatggcctgttcccatggtgcggtctgctgctggacacccgaactcttgaagtgcagtccgactactccagctatgcccggacgagcatccgcgccagcctcactttcaatcgcggctttaaggccggacgaaacatgcgcagaaagcttttcggagtcctccggcttaaatgccattcgctctttctcgatctccaagtcaattcgctgcagaccgtgtgcacgaacatctacaagatcctgctgctccaagcctaccggttccacgcttgcgtgcttcagctgccgtttcaccaacaggtgtggaagaacccgaccttctttctgcgggtcattagcgatactgcctccctgtgttactcaatcctcaaggcaaagaacgccggaatgtcgctgggtgcgaaaggagccgcgggacctcttcctagcgaagcggtgcagtggctctgccaccaggctttcctcctgaagctgaccaggcacagagtgacctacgtcccgctgctgggctcgctgcgcactgcacagacccagctgtctagaaaactccccggcaccaccctgaccgctctggaagccgccgccaacccagcattgccgtcagatttcaagaccatcttggacggatccggcacaatcctgtctgagggcgccaccaacttcagcctgctgaaactggccggcgacgtggaactgaaccctggccctacccctggaacccagagccccttcttccttctgctgctgctgaccgtgctgactgtcgtgacaggctctggccacgccagctctacacctggcggcgagaaagagacaagcgccacccagagaagcagcgtgccaagcagcaccgagaagaacgccgtgtccatgaccagctccgtgctgagcagccactctcctggcagcggcagcagcacaacacagggccaggatgtgacactggcccctgccacagaacctgcctctggatctgccgccacctggggacaggacgtgacaagcgtgccagtgaccagacctgccctgggctctacaacaccccctgcccacgatgtgaccagcgcccctgataacaagcctgcccctggaagcacagcccctccagctcatggcgtgacctctgccccagataccagaccagccccaggatctacagccccacccgcacacggcgtgacaagtgcccctgacacaagacccgctccaggctctactgctcctcctgcccatggcgtgacaagcgctcccgatacaaggccagctcctggctccacagcaccaccagcacatggcgtgacatcagctcccgacactagacctgctcccggatcaaccgctccaccagctcacggcgtgaccagcgcacctgataccagacctgctctgggaagcaccgcccctcccgtgcacaatgtgacatctgcttccggcagcgccagcggctctgcctctacactggtgcacaacggcaccagcgccagagccacaacaaccccagccagcaagagcacccccttcagcatccctagccaccacagcgacacccctaccacactggccagccactccaccaagaccgatgcctctagcacccaccactccagcgtgccccctctgaccagcagcaaccacagcacaagcccccagctgtctaccggcgtctcattcttctttctgtccttccacatcagcaacctgcagttcaacagcagcctggaagatcccagcaccgactactaccaggaactgcagcgggatatcagcgagatgttcctgcaaatctacaagcagggcggcttcctgggcctgagcaacatcaagttcagacccggcagcgtggtggtgcagctgaccctggctttccgggaaggcaccatcaacgtgcacgacgtggaaacccagttcaaccagtacaagaccgaggccgccagccggtacaacctgaccatctccgatgtgtccgtgtccgacgtgcccttcccattctctgcccagtctggcgcaggcgtgccaggatggggaattgctctgctggtgctcgtgtgcgtgctggtggccctggccatcgtgtatctgattgccctggccgtgtgccagtgccggcggaagaattacggccagctggacatcttccccgccagagacacctaccaccccatgagcgagtaccccacataccacacccacggcagatacgtgccacccagctccaccgacagatccccctacgagaaagtgtctgccggcaacggcggcagctccctgagctacacaaatcctgccgtggccgctgcctccgccaacctg

SEQ ID NO: 25 - protein, 1457 aa, Artificial Sequence
  Synthetic Construct
MASGAAPEPERTPVGQGSWAHPGRTRGPSDRGFCVVSPARPAEEATSLEGALSGTRHSHPSVGRQHHAGPPSTSRPPRPWDTPCPPVYAETKHFLYSSGDKEQLRPSFLLSSLRPSLTGARRLVETIFLGSRPWMPGTPRRLPRLPQRYWQMRPLFLELLGNHAQCPYGVLLKTHCPLRAAVTPAAGVCAREKPQGSVAAPEEEDTDPRRLVQLLRQHSSPWQVYGFVRACLRRLVPPGLWGSRHNERRFLRNTKKFISLGKHAKLSLQELTWKMSVRDCAWLRRSPGVGCVPAAEHRLREEILAKFLHWLMSVYVVELLRSFFYVTETTFQKNRLFFYRKSVWSKLQSIGIRQHLKRVQLRELSEAEVRQHREARPALLTSRLRFIPKPDGLRPIVNMDYVVGARTFRREKRAERLTSRVKALFSVLNYERARRPGLLGASVLGLDDIHRAWRTFVLRVRAQDPPPELYFVKVAITGAYDTIPQDRLTEVIASIIKPQNTYCVRRYAVVQKAAHGHVRKAFKSHVSTLTDLQPYMRQFVAHLQETSPLRDAVVIEQSSSLNEASSGLFDVFLRFMCHHAVRIRGKSYVQCQGIPQGSILSTLLCSLCYGDMENKLFAGIRRDGLLLRLVDDFLLVTPHLTHAKTFLRTLVRGVPEYGCVVNLRKTVVNFPVEDEALGGTAFVQMPAHGLFPWCGLLLDTRTLEVQSDYSSYARTSIRASLTFNRGFKAGRNMRRKLFGVLRLKCHSLFLDLQVNSLQTVCTNIYKILLLQAYRFHACVLQLPFHQQVWKNPTFFLRVISDTASLCYSILKAKNAGMSLGAKGAAGPLPSEAVQWLCHQAFLLKLTRHRVTYVPLLGSLRTAQTQLSRKLPGTTLTALEAAANPALPSDFKTILDGSGTILSEGATNFSLLKLAGDVELNPGPTPGTQSPFFLLLLLTVLTVVTGSGHASSTPGGEKETSATQRSSVPSSTEKNAVSMTSSVLSSHSPGSGSSTTQGQDVTLAPATEPASGSAATWGQDVTSVPVTRPALGSTTPPAHDVTSAPDNKPAPGSTAPPAHGVTSAPDTRPAPGSTAPPAHGVTSAPDTRPAPGSTAPPAHGVTSAPDTRPAPGSTAPPAHGVTSAPDTRPAPGSTAPPAHGVTSAPDTRPALGSTAPPVHNVTSASGSASGSASTLVHNGTSARATTTPASKSTPFSIPSHHSDTPTTLASHSTKTDASSTHHSSVPPLTSSNHSTSPQLSTGVSFFFLSFHISNLQFNSSLEDPSTDYYQELQRDISEMFLQIYKQGGFLGLSNIKFRPGSVVVQLTLAFREGTINVHDVETQFNQYKTEAASRYNLTISDVSVSDVPFPFSAQSGAGVPGWGIALLVLVCVLVALAIVYLIALAVCQCRRKNYGQLDIFPARDTYHPMSEYPTYHTHGRYVPPSSTDRSPYEKVSAGNGGSSLSYTNPAVAAASANL

SEQ ID NO: 26 - DNA, 4311 bp, Artificial Sequence
  Synthetic Construct
atggctagcacaggctctggccacgccagctctacacctggcggcgagaaagagacaagcgccacccagagaagcagcgtgccaagcagcaccgagaagaacgccgtgtccatgaccagctccgtgctgagcagccactctcctggcagcggcagcagcacaacacagggccaggatgtgacactggcccctgccacagaacctgcctctggatctgccgccacctggggacaggacgtgacaagcgtgccagtgaccagacctgccctgggctctacaacaccccctgcccacgatgtgaccagcgcccctgataacaagcctgcccctggaagcacagcccctccagctcatggcgtgacctctgccccagataccagaccagccccaggatctacagccccacccgcacacggcgtgacaagtgcccctgacacaagacccgctccaggctctactgctcctcctgcccatggcgtgacaagcgctcccgatacaaggccagctcctggctccacagcaccaccagcacatggcgtgacatcagctcccgacactagacctgctcccggatcaaccgctccaccagctcacggcgtgaccagcgcacctgataccagacctgctctgggaagcaccgcccctcccgtgcacaatgtgacatctgcttccggcagcgccagcggctctgcctctacactggtgcacaacggcaccagcgccagagccacaacaaccccagccagcaagagcacccccttcagcatccctagccaccacagcgacacccctaccacactggccagccactccaccaagaccgatgcctctagcacccaccactccagcgtgccccctctgaccagcagcaaccacagcacaagcccccagctgtctaccggcgtctcattcttctttctgtccttccacatcagcaacctgcagttcaacagcagcctggaagatcccagcaccgactactaccaggaactgcagcgggatatcagcgagatgttcctgcaaatctacaagcagggcggcttcctgggcctgagcaacatcaagttcagacccggcagcgtggtggtgcagctgaccctggctttccgggaaggcaccatcaacgtgcacgacgtggaaacccagttcaaccagtacaagaccgaggccgccagccggtacaacctgaccatctccgatgtgtccgtgtccgacgtgcccttcccattctctgcccagtctggcgcaggcgtgccaggatggggaattgctctgctggtgctcgtgtgcgtgctggtggccctggccatcgtgtatctgattgccctggccgtgtgccagtgccggcggaagaattacggccagctggacatcttccccgccagagacacctaccaccccatgagcgagtaccccacataccacacccacggcagatacgtgccacccagctccaccgacagatccccctacgagaaagtgtctgccggcaacggcggcagctccctgagctacacaaatcctgccgtggccgctgcctccgccaacctgggatccggcacaatcctgtctgagggcgccaccaacttcagcctgctgaaactggccggcgacgtggaactgaaccctggccctggagctgccccggagccggagaggacccccgttggccagggatcgtgggcccatccgggacgcaccaggggaccatccgacaggggattctgtgtggtgtcaccggccaggccagcagaagaggcaaccagcctcgagggagcgttgtctggaaccagacattcccacccgtcggtgggccggcagcaccacgcgggaccaccgtccacttccagaccgccacggccatgggacaccccttgcccgcctgtgtatgccgagactaaacacttcctgtactcatccggagacaaggaacagcttcggccgtccttcctcctgtcgtcgctcagaccgagcctgaccggagcacgcagattggtggaaactatcttccttgggtcacgtccgtggatgccaggtaccccacggcgcctcccgcgcctcccacagagatactggcagatgcggcctctgttcctggaattgctgggaaaccacgctcagtgcccgtacggagtcctgctcaagactcactgccctctgagggcggcggtcactccggcggccggagtgtgcgcacgggagaagccccagggaagcgtggcagctccggaagaggaggacaccgatccgcgccgcctcgtgcaacttctgcgccagcactcctcgccctggcaagtctacgggttcgtccgcgcctgcctgcgccgcctggtgccgcctgggctctggggttcccggcataacgagcgccgcttcctgagaaatactaagaagtttatctcacttggaaaacatgccaagttgtcgctgcaagaactcacgtggaagatgtcagtccgcgattgcgcctggctgcgccgctcgccgggcgtcgggtgtgttccagctgcagaacaccgcctgagagaagaaattctggccaaatttctgcattggctgatgtcagtgtacgtggtcgagctgctgcgctcctttttctacgtcactgagactacctttcaaaagaaccgcctgttcttctaccgcaaatctgtgtggagcaagctgcagtcaatcggcattcgccagcatctgaagagggtgcagctgcgggaactttccgaggcagaagtccgccagcaccgggaggcccggccggcgcttctcacgtcgcgtctgagattcatcccaaagcccgacgggctgaggcctatcgtcaacatggattacgtcgtgggcgctcgcacctttcgccgtgaaaagcgggccgaacgcttgacctcacgggtgaaggccctcttctccgtgctgaactacgagagagcaagacggcctggcctgctgggagcttcggtgctgggactggacgatatccaccgggcttggcggacctttgttctccgggtgagagcccaagaccctccgccggaactgtacttcgtgaaggtggcgatcaccggagcctatgatactattccgcaagatcgactcaccgaagtcatcgcctcgatcatcaaaccgcagaacacttactgcgtcaggcggtacgccgtggtccagaaggccgcgcatggccacgtgagaaaggcgttcaagtcgcacgtgtccactctcaccgacctccagccttacatgaggcaattcgttgcgcatttgcaagagacttcgcccctgagagatgcggtggtcatcgagcagagctccagcctgaacgaagcgagcagcggtctgtttgacgtgttcctccgcttcatgtgtcatcacgcggtgcgaatcaggggaaaatcatacgtgcagtgccagggaatcccacaaggcagcattctgtcgactctcttgtgttccctttgctacggcgatatggaaaacaagctgttcgctgggatcagacgggacgggttgctgctcagactggtggacgacttcctgctggtgactccgcacctcactcacgccaaaacctttctccgcactctggtgaggggagtgccagaatacggctgtgtggtcaatctccggaaaactgtggtgaatttccctgtcgaggatgaggcactcggaggaaccgcatttgtccaaatgccagcacatggcctgttcccatggtgcggtctgctgctggacacccgaactcttgaagtgcagtccgactactccagctatgcccggacgagcatccgcgccagcctcactttcaatcgcggctttaaggccggacgaaacatgcgcagaaagcttttcggagtcctccggcttaaatgccattcgctctttctcgatctccaagtcaattcgctgcagaccgtgtgcacgaacatctacaagatcctgctgctccaagcctaccggttccacgcttgcgtgcttcagctgccgtttcaccaacaggtgtggaagaacccgaccttctttctgcgggtcattagcgatactgcctccctgtgttactcaatcctcaaggcaaagaacgccggaatgtcgctgggtgcgaaaggagccgcgggacctcttcctagcgaagcggtgcagtggctctgccaccaggctttcctcctgaagctgaccaggcacagagtgacctacgtcccgctgctgggctcgctgcgcactgcacagacccagctgtctagaaaactccccggcaccaccctgaccgctctggaagccgccgccaacccagcattgccgtcagatttcaagaccatcttggac

SEQ ID NO: 27 - protein, 1437 aa, Artificial Sequence
  Synthetic Construct
MASTGSGHASSTPGGEKETSATQRSSVPSSTEKNAVSMTSSVLSSHSPGSGSSTTQGQDVTLAPATEPASGSAATWGQDVTSVPVTRPALGSTTPPAHDVTSAPDNKPAPGSTAPPAHGVTSAPDTRPAPGSTAPPAHGVTSAPDTRPAPGSTAPPAHGVTSAPDTRPAPGSTAPPAHGVTSAPDTRPAPGSTAPPAHGVTSAPDTRPALGSTAPPVHNVTSASGSASGSASTLVHNGTSARATTTPASKSTPFSIPSHHSDTPTTLASHSTKTDASSTHHSSVPPLTSSNHSTSPQLSTGVSFFFLSFHISNLQFNSSLEDPSTDYYQELQRDISEMFLQIYKQGGFLGLSNIKFRPGSVVVQLTLAFREGTINVHDVETQFNQYKTEAASRYNLTISDVSVSDVPFPFSAQSGAGVPGWGIALLVLVCVLVALAIVYLIALAVCQCRRKNYGQLDIFPARDTYHPMSEYPTYHTHGRYVPPSSTDRSPYEKVSAGNGGSSLSYTNPAVAAASANLGSGTILSEGATNFSLLKLAGDVELNPGPGAAPEPERTPVGQGSWAHPGRTRGPSDRGFCVVSPARPAEEATSLEGALSGTRHSHPSVGRQHHAGPPSTSRPPRPWDTPCPPVYAETKHFLYSSGDKEQLRPSFLLSSLRPSLTGARRLVETIFLGSRPWMPGTPRRLPRLPQRYWQMRPLFLELLGNHAQCPYGVLLKTHCPLRAAVTPAAGVCAREKPQGSVAAPEEEDTDPRRLVQLLRQHSSPWQVYGFVRACLRRLVPPGLWGSRHNERRFLRNTKKFISLGKHAKLSLQELTWKMSVRDCAWLRRSPGVGCVPAAEHRLREEILAKFLHWLMSVYVVELLRSFFYVTETTFQKNRLFFYRKSVWSKLQSIGIRQHLKRVQLRELSEAEVRQHREARPALLTSRLRFIPKPDGLRPIVNMDYVVGARTFRREKRAERLTSRVKALFSVLNYERARRPGLLGASVLGLDDIHRAWRTFVLRVRAQDPPPELYFVKVAITGAYDTIPQDRLTEVIASIIKPQNTYCVRRYAVVQKAAHGHVRKAFKSHVSTLTDLQPYMRQFVAHLQETSPLRDAVVIEQSSSLNEASSGLFDVFLRFMCHHAVRIRGKSYVQCQGIPQGSILSTLLCSLCYGDMENKLFAGIRRDGLLLRLVDDFLLVTPHLTHAKTFLRTLVRGVPEYGCVVNLRKTVVNFPVEDEALGGTAFVQMPAHGLFPWCGLLLDTRTLEVQSDYSSYARTSIRASLTFNRGFKAGRNMRRKLFGVLRLKCHSLFLDLQVNSLQTVCTNIYKILLLQAYRFHACVLQLPFHQQVWKNPTFFLRVISDTASLCYSILKAKNAGMSLGAKGAAGPLPSEAVQWLCHQAFLLKLTRHRVTYVPLLGSLRTAQTQLSRKLPGTTLTALEAAANPALPSDFKTILD

SEQ ID NO: 28 - DNA, 4311 bp, Artificial Sequence
  Synthetic Construct
atggctagcggagctgccccggagccggagaggacccccgttggccagggatcgtgggcccatccgggacgcaccaggggaccatccgacaggggattctgtgtggtgtcaccggccaggccagcagaagaggcaaccagcctcgagggagcgttgtctggaaccagacattcccacccgtcggtgggccggcagcaccacgcgggaccaccgtccacttccagaccgccacggccatgggacaccccttgcccgcctgtgtatgccgagactaaacacttcctgtactcatccggagacaaggaacagcttcggccgtccttcctcctgtcgtcgctcagaccgagcctgaccggagcacgcagattggtggaaactatcttccttgggtcacgtccgtggatgccaggtaccccacggcgcctcccgcgcctcccacagagatactggcagatgcggcctctgttcctggaattgctgggaaaccacgctcagtgcccgtacggagtcctgctcaagactcactgccctctgagggcggcggtcactccggcggccggagtgtgcgcacgggagaagccccagggaagcgtggcagctccggaagaggaggacaccgatccgcgccgcctcgtgcaacttctgcgccagcactcctcgccctggcaagtctacgggttcgtccgcgcctgcctgcgccgcctggtgccgcctgggctctggggttcccggcataacgagcgccgcttcctgagaaatactaagaagtttatctcacttggaaaacatgccaagttgtcgctgcaagaactcacgtggaagatgtcagtccgcgattgcgcctggctgcgccgctcgccgggcgtcgggtgtgttccagctgcagaacaccgcctgagagaagaaattctggccaaatttctgcattggctgatgtcagtgtacgtggtcgagctgctgcgctcctttttctacgtcactgagactacctttcaaaagaaccgcctgttcttctaccgcaaatctgtgtggagcaagctgcagtcaatcggcattcgccagcatctgaagagggtgcagctgcgggaactttccgaggcagaagtccgccagcaccgggaggcccggccggcgcttctcacgtcgcgtctgagattcatcccaaagcccgacgggctgaggcctatcgtcaacatggattacgtcgtgggcgctcgcacctttcgccgtgaaaagcgggccgaacgcttgacctcacgggtgaaggccctcttctccgtgctgaactacgagagagcaagacggcctggcctgctgggagcttcggtgctgggactggacgatatccaccgggcttggcggacctttgttctccgggtgagagcccaagaccctccgccggaactgtacttcgtgaaggtggcgatcaccggagcctatgatactattccgcaagatcgactcaccgaagtcatcgcctcgatcatcaaaccgcagaacacttactgcgtcaggcggtacgccgtggtccagaaggccgcgcatggccacgtgagaaaggcgttcaagtcgcacgtgtccactctcaccgacctccagccttacatgaggcaattcgttgcgcatttgcaagagacttcgcccctgagagatgcggtggtcatcgagcagagctccagcctgaacgaagcgagcagcggtctgtttgacgtgttcctccgcttcatgtgtcatcacgcggtgcgaatcaggggaaaatcatacgtgcagtgccagggaatcccacaaggcagcattctgtcgactctcttgtgttccctttgctacggcgatatggaaaacaagctgttcgctgggatcagacgggacgggttgctgctcagactggtggacgacttcctgctggtgactccgcacctcactcacgccaaaacctttctccgcactctggtgaggggagtgccagaatacggctgtgtggtcaatctccggaaaactgtggtgaatttccctgtcgaggatgaggcactcggaggaaccgcatttgtccaaatgccagcacatggcctgttcccatggtgcggtctgctgctggacacccgaactcttgaagtgcagtccgactactccagctatgcccggacgagcatccgcgccagcctcactttcaatcgcggctttaaggccggacgaaacatgcgcagaaagcttttcggagtcctccggcttaaatgccattcgctctttctcgatctccaagtcaattcgctgcagaccgtgtgcacgaacatctacaagatcctgctgctccaagcctaccggttccacgcttgcgtgcttcagctgccgtttcaccaacaggtgtggaagaacccgaccttctttctgcgggtcattagcgatactgcctccctgtgttactcaatcctcaaggcaaagaacgccggaatgtcgctgggtgcgaaaggagccgcgggacctcttcctagcgaagcggtgcagtggctctgccaccaggctttcctcctgaagctgaccaggcacagagtgacctacgtcccgctgctgggctcgctgcgcactgcacagacccagctgtctagaaaactccccggcaccaccctgaccgctctggaagccgccgccaacccagcattgccgtcagatttcaagaccatcttggacggatccggcacaatcctgtctgagggcgccaccaacttcagcctgctgaaactggccggcgacgtggaactgaaccctggccctacaggctctggccacgccagctctacacctggcggcgagaaagagacaagcgccacccagagaagcagcgtgccaagcagcaccgagaagaacgccgtgtccatgaccagctccgtgctgagcagccactctcctggcagcggcagcagcacaacacagggccaggatgtgacactggcccctgccacagaacctgcctctggatctgccgccacctggggacaggacgtgacaagcgtgccagtgaccagacctgccctgggctctacaacaccccctgcccacgatgtgaccagcgcccctgataacaagcctgcccctggaagcacagcccctccagctcatggcgtgacctctgccccagataccagaccagccccaggatctacagccccacccgcacacggcgtgacaagtgcccctgacacaagacccgctccaggctctactgctcctcctgcccatggcgtgacaagcgctcccgatacaaggccagctcctggctccacagcaccaccagcacatggcgtgacatcagctcccgacactagacctgctcccggatcaaccgctccaccagctcacggcgtgaccagcgcacctgataccagacctgctctgggaagcaccgcccctcccgtgcacaatgtgacatctgcttccggcagcgccagcggctctgcctctacactggtgcacaacggcaccagcgccagagccacaacaaccccagccagcaagagcacccccttcagcatccctagccaccacagcgacacccctaccacactggccagccactccaccaagaccgatgcctctagcacccaccactccagcgtgccccctctgaccagcagcaaccacagcacaagcccccagctgtctaccggcgtctcattcttctttctgtccttccacatcagcaacctgcagttcaacagcagcctggaagatcccagcaccgactactaccaggaactgcagcgggatatcagcgagatgttcctgcaaatctacaagcagggcggcttcctgggcctgagcaacatcaagttcagacccggcagcgtggtggtgcagctgaccctggctttccgggaaggcaccatcaacgtgcacgacgtggaaacccagttcaaccagtacaagaccgaggccgccagccggtacaacctgaccatctccgatgtgtccgtgtccgacgtgcccttcccattctctgcccagtctggcgcaggcgtgccaggatggggaattgctctgctggtgctcgtgtgcgtgctggtggccctggccatcgtgtatctgattgccctggccgtgtgccagtgccggcggaagaattacggccagctggacatcttccccgccagagacacctaccaccccatgagcgagtaccccacataccacacccacggcagatacgtgccacccagctccaccgacagatccccctacgagaaagtgtctgccggcaacggcggcagctccctgagctacacaaatcctgccgtggccgctgcctccgccaacctg

SEQ ID NO: 29 - protein, 1437 aa, Artificial Sequence
  Synthetic Construct
MASGAAPEPERTPVGQGSWAHPGRTRGPSDRGFCVVSPARPAEEATSLEGALSGTRHSHPSVGRQHHAGPPSTSRPPRPWDTPCPPVYAETKHFLYSSGDKEQLRPSFLLSSLRPSLTGARRLVETIFLGSRPWMPGTPRRLPRLPQRYWQMRPLFLELLGNHAQCPYGVLLKTHCPLRAAVTPAAGVCAREKPQGSVAAPEEEDTDPRRLVQLLRQHSSPWQVYGFVRACLRRLVPPGLWGSRHNERRFLRNTKKFISLGKHAKLSLQELTWKMSVRDCAWLRRSPGVGCVPAAEHRLREEILAKFLHWLMSVYVVELLRSFFYVTETTFQKNRLFFYRKSVWSKLQSIGIRQHLKRVQLRELSEAEVRQHREARPALLTSRLRFIPKPDGLRPIVNMDYVVGARTFRREKRAERLTSRVKALFSVLNYERARRPGLLGASVLGLDDIHRAWRTFVLRVRAQDPPPELYFVKVAITGAYDTIPQDRLTEVIASIIKPQNTYCVRRYAVVQKAAHGHVRKAFKSHVSTLTDLQPYMRQFVAHLQETSPLRDAVVIEQSSSLNEASSGLFDVFLRFMCHHAVRIRGKSYVQCQGIPQGSILSTLLCSLCYGDMENKLFAGIRRDGLLLRLVDDFLLVTPHLTHAKTFLRTLVRGVPEYGCVVNLRKTVVNFPVEDEALGGTAFVQMPAHGLFPWCGLLLDTRTLEVQSDYSSYARTSIRASLTFNRGFKAGRNMRRKLFGVLRLKCHSLFLDLQVNSLQTVCTNIYKILLLQAYRFHACVLQLPFHQQVWKNPTFFLRVISDTASLCYSILKAKNAGMSLGAKGAAGPLPSEAVQWLCHQAFLLKLTRHRVTYVPLLGSLRTAQTQLSRKLPGTTLTALEAAANPALPSDFKTILDGSGTILSEGATNFSLLKLAGDVELNPGPTGSGHASSTPGGEKETSATQRSSVPSSTEKNAVSMTSSVLSSHSPGSGSSTTQGQDVTLAPATEPASGSAATWGQDVTSVPVTRPALGSTTPPAHDVTSAPDNKPAPGSTAPPAHGVTSAPDTRPAPGSTAPPAHGVTSAPDTRPAPGSTAPPAHGVTSAPDTRPAPGSTAPPAHGVTSAPDTRPAPGSTAPPAHGVTSAPDTRPALGSTAPPVHNVTSASGSASGSASTLVHNGTSARATTTPASKSTPFSIPSHHSDTPTTLASHSTKTDASSTHHSSVPPLTSSNHSTSPQLSTGVSFFFLSFHISNLQFNSSLEDPSTDYYQELQRDISEMFLQIYKQGGFLGLSNIKFRPGSVVVQLTLAFREGTINVHDVETQFNQYKTEAASRYNLTISDVSVSDVPFPFSAQSGAGVPGWGIALLVLVCVLVALAIVYLIALAVCQCRRKNYGQLDIFPARDTYHPMSEYPTYHTHGRYVPPSSTDRSPYEKVSAGNGGSSLSYTNPAVAAASANL

SEQ ID NO: 30 - DNA, 3264 bp, Artificial Sequence
  Synthetic Construct
atggctagcacccctggaacccagagccccttcttccttctgctgctgctgaccgtgctgactgtcgtgacaggctctggccacgccagctctacacctggcggcgagaaagagacaagcgccacccagagaagcagcgtgccaagcagcaccgagaagaacgccgtgtccatgaccagctccgtgctgagcagccactctcctggcagcggcagcagcacaacacagggccaggatgtgacactggcccctgccacagaacctgcctctggatctgccgccacctggggacaggacgtgacaagcgtgccagtgaccagacctgccctgggctctacaacaccccctgcccacgatgtgaccagcgcccctgataacaagcctgcccctggaagcacagcccctccagctcatggcgtgacctctgccccagataccagaccagccccaggatctacagccccacccgcacacggcgtgacaagtgcccctgacacaagacccgctccaggctctactgctcctcctgcccatggcgtgacaagcgctcccgatacaaggccagctcctggctccacagcaccaccagcacatggcgtgacatcagctcccgacactagacctgctcccggatcaaccgctccaccagctcacggcgtgaccagcgcacctgataccagacctgctctgggaagcaccgcccctcccgtgcacaatgtgacatctgcttccggcagcgccagcggctctgcctctacactggtgcacaacggcaccagcgccagagccacaacaaccccagccagcaagagcacccccttcagcatccctagccaccacagcgacacccctaccacactggccagccactccaccaagaccgatgcctctagcacccaccactccagcgtgccccctctgaccagcagcaaccacagcacaagcccccagctgtctaccggcgtctcattcttctttctgtccttccacatcagcaacctgcagttcaacagcagcctggaagatcccagcaccgactactaccaggaactgcagcgggatatcagcgagatgttcctgcaaatctacaagcagggcggcttcctgggcctgagcaacatcaagttcagacccggcagcgtggtggtgcagctgaccctggctttccgggaaggcaccatcaacgtgcacgacgtggaaacccagttcaaccagtacaagaccgaggccgccagccggtacaacctgaccatctccgatgtgtccgtgtccgacgtgcccttcccattctctgcccagtctggcgcaggcgtgccaggatggggaattgctctgctggtgctcgtgtgcgtgctggtggccctggccatcgtgtatctgattgccctggccgtgtgccagtgccggcggaagaattacggccagctggacatcttccccgccagagacacctaccaccccatgagcgagtaccccacataccacacccacggcagatacgtgccacccagctccaccgacagatccccctacgagaaagtgtctgccggcaacggcggcagctccctgagctacacaaatcctgccgtggccgctgcctccgccaacctgggatccggcagaatcttcaacgcccactacgccggctacttcgccgacctgctgatccacgacatcgagacaaaccctggccccgaatcgccaagcgcaccccctcatcggtggtgcatcccttggcaacgcctcctcctgaccgcctcactgctgactttctggaacccgccgaccaccgcaaagctgaccattgagagcactcccttcaacgtggctgaggggaaggaggtgctgctcctggtgcacaatctgccccagcacctgttcgggtactcctggtacaagggagaacgcgtggacgggaaccggcagatcataggctacgtcatcggaacccagcaggccacacccggtccagcgtacagcggccgggagattatctacccgaacgcctccctgctgatccaaaacatcatccagaacgacaccggtttctacactctgcacgtgattaagtcagatctggtcaacgaagaggccaccggccaattcagggtgtaccccgaactccctaagccgttcatcacctcgaacaacagcaacccggtcgaggatgaagatgcggtggccttgacgtgcgaacctgagatccagaacaccacctacttgtggtgggtgaacaatcagagcctgccagtctccccacgactccagctgtcgaacgacaacaggaccctgactttgctgtccgtgactcggaacgacgtgggcccttatgaatgcggtatccagaacaagctgtccgtggaccacagcgaccctgtgatcctgaacgtcctttacgggccggacgaccccaccatttccccgtcgtacacttactaccggccgggcgtgaacctgtccctgtcgtgccacgctgcctccaatccgccggcccagtactcctggctcatcgacggaaacatccagcagcacacccaagaactgttcatctccaacattaccgagaaaaactcgggactttacacctgtcaagccaacaattccgccagcggccactcccgcaccactgtcaaaactatcactgtgtccgccgaactcccgaagcccagcatcagctccaacaactcgaagcccgtggaggataaggacgctgtcgcgttcacctgtgaaccagaggcacagaataccacctacctttggtgggtcaacggacagtccctgcctgtctcaccgagactgcagctgtcaaacgggaataggactctgaccttgtttaacgtcacccggaacgacgcccgggcctacgtgtgcggcatccagaactccgtgagcgcaaaccggtctgacccagtgaccctggatgtgctgtacggccccgacactccgatcatttcaccccccgattcatcctacctgtccggcgctaacctcaacctctcatgccactccgcatccaaccccagcccgcaatattcgtggcgcattaacggaattcctcagcaacatacccaggtcctgttcattgcgaagatcacccctaacaacaacggaacctacgcctgctttgtgtcaaacctggccactggtagaaacaactccatcgtgaagtccattaccgtgtcggcgtccggaacttccccgggcctgagcgccggcgccaccgtgggaattatgatcggcgtgctcgtgggagtggccctgatc

SEQ ID NO: 31 - protein, 1088 aa, Artificial Sequence
  Synthetic Construct
MASTPGTQSPFFLLLLLTVLTVVTGSGHASSTPGGEKETSATQRSSVPSSTEKNAVSMTSSVLSSHSPGSGSSTTQGQDVTLAPATEPASGSAATWGQDVTSVPVTRPALGSTTPPAHDVTSAPDNKPAPGSTAPPAHGVTSAPDTRPAPGSTAPPAHGVTSAPDTRPAPGSTAPPAHGVTSAPDTRPAPGSTAPPAHGVTSAPDTRPAPGSTAPPAHGVTSAPDTRPALGSTAPPVHNVTSASGSASGSASTLVHNGTSARATTTPASKSTPFSIPSHHSDTPTTLASHSTKTDASSTHHSSVPPLTSSNHSTSPQLSTGVSFFFLSFHISNLQFNSSLEDPSTDYYQELQRDISEMFLQIYKQGGFLGLSNIKFRPGSVVVQLTLAFREGTINVHDVETQFNQYKTEAASRYNLTISDVSVSDVPFPFSAQSGAGVPGWGIALLVLVCVLVALAIVYLIALAVCQCRRKNYGQLDIFPARDTYHPMSEYPTYHTHGRYVPPSSTDRSPYEKVSAGNGGSSLSYTNPAVAAASANLGSGRIFNAHYAGYFADLLIHDIETNPGPESPSAPPHRWCIPWQRLLLTASLLTFWNPPTTAKLTIESTPFNVAEGKEVLLLVHNLPQHLFGYSWYKGERVDGNRQIIGYVIGTQQATPGPAYSGREIIYPNASLLIQNIIQNDTGFYTLHVIKSDLVNEEATGQFRVYPELPKPFITSNNSNPVEDEDAVALTCEPEIQNTTYLWWVNNQSLPVSPRLQLSNDNRTLTLLSVTRNDVGPYECGIQNKLSVDHSDPVILNVLYGPDDPTISPSYTYYRPGVNLSLSCHAASNPPAQYSWLIDGNIQQHTQELFISNITEKNSGLYTCQANNSASGHSRTTVKTITVSAELPKPSISSNNSKPVEDKDAVAFTCEPEAQNTTYLWWVNGQSLPVSPRLQLSNGNRTLTLFNVTRNDARAYVCGIQNSVSANRSDPVTLDVLYGPDTPIISPPDSSYLSGANLNLSCHSASNPSPQYSWRINGIPQQHTQVLFIAKITPNNNGTYACFVSNLATGRNNSIVKSITVSASGTSPGLSAGATVGIMIGVLVGVALI

SEQ ID NO: 32 - DNA, 3243 bp, Artificial Sequence
  Synthetic Construct
atggctagcgaatcgccaagcgcaccccctcatcggtggtgcatcccttggcaacgcctcctcctgaccgcctcactgctgactttctggaacccgccgaccaccgcaaagctgaccattgagagcactcccttcaacgtggctgaggggaaggaggtgctgctcctggtgcacaatctgccccagcacctgttcgggtactcctggtacaagggagaacgcgtggacgggaaccggcagatcataggctacgtcatcggaacccagcaggccacacccggtccagcgtacagcggccgggagattatctacccgaacgcctccctgctgatccaaaacatcatccagaacgacaccggtttctacactctgcacgtgattaagtcagatctggtcaacgaagaggccaccggccaattcagggtgtaccccgaactccctaagccgttcatcacctcgaacaacagcaacccggtcgaggatgaagatgcggtggccttgacgtgcgaacctgagatccagaacaccacctacttgtggtgggtgaacaatcagagcctgccagtctccccacgactccagctgtcgaacgacaacaggaccctgactttgctgtccgtgactcggaacgacgtgggcccttatgaatgcggtatccagaacaagctgtccgtggaccacagcgaccctgtgatcctgaacgtcctttacgggccggacgaccccaccatttccccgtcgtacacttactaccggccgggcgtgaacctgtccctgtcgtgccacgctgcctccaatccgccggcccagtactcctggctcatcgacggaaacatccagcagcacacccaagaactgttcatctccaacattaccgagaaaaactcgggactttacacctgtcaagccaacaattccgccagcggccactcccgcaccactgtcaaaactatcactgtgtccgccgaactcccgaagcccagcatcagctccaacaactcgaagcccgtggaggataaggacgctgtcgcgttcacctgtgaaccagaggcacagaataccacctacctttggtgggtcaacggacagtccctgcctgtctcaccgagactgcagctgtcaaacgggaataggactctgaccttgtttaacgtcacccggaacgacgcccgggcctacgtgtgcggcatccagaactccgtgagcgcaaaccggtctgacccagtgaccctggatgtgctgtacggccccgacactccgatcatttcaccccccgattcatcctacctgtccggcgctaacctcaacctctcatgccactccgcatccaaccccagcccgcaatattcgtggcgcattaacggaattcctcagcaacatacccaggtcctgttcattgcgaagatcacccctaacaacaacggaacctacgcctgctttgtgtcaaacctggccactggtagaaacaactccatcgtgaagtccattaccgtgtcggcgtccggaacttccccgggcctgagcgccggcgccaccgtgggaattatgatcggcgtgctcgtgggagtggccctgatcggatccggcgagggcagaggcagcctgctgacatgtggcgacgtggaagagaaccctggccccacccctggaacccagagccccttcttccttctgctgctgctgaccgtgctgactgtcgtgacaggctctggccacgccagctctacacctggcggcgagaaagagacaagcgccacccagagaagcagcgtgccaagcagcaccgagaagaacgccgtgtccatgaccagctccgtgctgagcagccactctcctggcagcggcagcagcacaacacagggccaggatgtgacactggcccctgccacagaacctgcctctggatctgccgccacctggggacaggacgtgacaagcgtgccagtgaccagacctgccctgggctctacaacaccccctgcccacgatgtgaccagcgcccctgataacaagcctgcccctggaagcacagcccctccagctcatggcgtgacctctgccccagataccagaccagccccaggatctacagccccacccgcacacggcgtgacaagtgcccctgacacaagacccgctccaggctctactgctcctcctgcccatggcgtgacaagcgctcccgatacaaggccagctcctggctccacagcaccaccagcacatggcgtgacatcagctcccgacactagacctgctcccggatcaaccgctccaccagctcacggcgtgaccagcgcacctgataccagacctgctctgggaagcaccgcccctcccgtgcacaatgtgacatctgcttccggcagcgccagcggctctgcctctacactggtgcacaacggcaccagcgccagagccacaacaaccccagccagcaagagcacccccttcagcatccctagccaccacagcgacacccctaccacactggccagccactccaccaagaccgatgcctctagcacccaccactccagcgtgccccctctgaccagcagcaaccacagcacaagcccccagctgtctaccggcgtctcattcttctttctgtccttccacatcagcaacctgcagttcaacagcagcctggaagatcccagcaccgactactaccaggaactgcagcgggatatcagcgagatgttcctgcaaatctacaagcagggcggcttcctgggcctgagcaacatcaagttcagacccggcagcgtggtggtgcagctgaccctggctttccgggaaggcaccatcaacgtgcacgacgtggaaacccagttcaaccagtacaagaccgaggccgccagccggtacaacctgaccatctccgatgtgtccgtgtccgacgtgcccttcccattctctgcccagtctggcgcaggcgtgccaggatggggaattgctctgctggtgctcgtgtgcgtgctggtggccctggccatcgtgtatctgattgccctggccgtgtgccagtgccggcggaagaattacggccagctggacatcttccccgccagagacacctaccaccccatgagcgagtaccccacataccacacccacggcagatacgtgccacccagctccaccgacagatccccctacgagaaagtgtctgccggcaacggcggcagctccctgagctacacaaatcctgccgtggccgctgcctccgccaacctg

SEQ ID NO: 33 - protein, 1081 aa, Artificial Sequence
  Synthetic Construct
MASESPSAPPHRWCIPWQRLLLTASLLTFWNPPTTAKLTIESTPFNVAEGKEVLLLVHNLPQHLFGYSWYKGERVDGNRQIIGYVIGTQQATPGPAYSGREIIYPNASLLIQNIIQNDTGFYTLHVIKSDLVNEEATGQFRVYPELPKPFITSNNSNPVEDEDAVALTCEPEIQNTTYLWWVNNQSLPVSPRLQLSNDNRTLTLLSVTRNDVGPYECGIQNKLSVDHSDPVILNVLYGPDDPTISPSYTYYRPGVNLSLSCHAASNPPAQYSWLIDGNIQQHTQELFISNITEKNSGLYTCQANNSASGHSRTTVKTITVSAELPKPSISSNNSKPVEDKDAVAFTCEPEAQNTTYLWWVNGQSLPVSPRLQLSNGNRTLTLFNVTRNDARAYVCGIQNSVSANRSDPVTLDVLYGPDTPIISPPDSSYLSGANLNLSCHSASNPSPQYSWRINGIPQQHTQVLFIAKITPNNNGTYACFVSNLATGRNNSIVKSITVSASGTSPGLSAGATVGIMIGVLVGVALIGSGEGRGSLLTCGDVEENPGPTPGTQSPFFLLLLLTVLTVVTGSGHASSTPGGEKETSATQRSSVPSSTEKNAVSMTSSVLSSHSPGSGSSTTQGQDVTLAPATEPASGSAATWGQDVTSVPVTRPALGSTTPPAHDVTSAPDNKPAPGSTAPPAHGVTSAPDTRPAPGSTAPPAHGVTSAPDTRPAPGSTAPPAHGVTSAPDTRPAPGSTAPPAHGVTSAPDTRPAPGSTAPPAHGVTSAPDTRPALGSTAPPVHNVTSASGSASGSASTLVHNGTSARATTTPASKSTPFSIPSHHSDTPTTLASHSTKTDASSTHHSSVPPLTSSNHSTSPQLSTGVSFFFLSFHISNLQFNSSLEDPSTDYYQELQRDISEMFLQIYKQGGFLGLSNIKFRPGSVVVQLTLAFREGTINVHDVETQFNQYKTEAASRYNLTISDVSVSDVPFPFSAQSGAGVPGWGIALLVLVCVLVALAIVYLIALAVCQCRRKNYGQLDIFPARDTYHPMSEYPTYHTHGRYVPPSSTDRSPYEKVSAGNGGSSLSYTNPAVAAASANL

SEQ ID NO: 34 - DNA, 3255 bp, Artificial Sequence
  Synthetic Construct
atggctagcgaatcgccaagcgcaccccctcatcggtggtgcatcccttggcaacgcctcctcctgaccgcctcactgctgactttctggaacccgccgaccaccgcaaagctgaccattgagagcactcccttcaacgtggctgaggggaaggaggtgctgctcctggtgcacaatctgccccagcacctgttcgggtactcctggtacaagggagaacgcgtggacgggaaccggcagatcataggctacgtcatcggaacccagcaggccacacccggtccagcgtacagcggccgggagattatctacccgaacgcctccctgctgatccaaaacatcatccagaacgacaccggtttctacactctgcacgtgattaagtcagatctggtcaacgaagaggccaccggccaattcagggtgtaccccgaactccctaagccgttcatcacctcgaacaacagcaacccggtcgaggatgaagatgcggtggccttgacgtgcgaacctgagatccagaacaccacctacttgtggtgggtgaacaatcagagcctgccagtctccccacgactccagctgtcgaacgacaacaggaccctgactttgctgtccgtgactcggaacgacgtgggcccttatgaatgcggtatccagaacaagctgtccgtggaccacagcgaccctgtgatcctgaacgtcctttacgggccggacgaccccaccatttccccgtcgtacacttactaccggccgggcgtgaacctgtccctgtcgtgccacgctgcctccaatccgccggcccagtactcctggctcatcgacggaaacatccagcagcacacccaagaactgttcatctccaacattaccgagaaaaactcgggactttacacctgtcaagccaacaattccgccagcggccactcccgcaccactgtcaaaactatcactgtgtccgccgaactcccgaagcccagcatcagctccaacaactcgaagcccgtggaggataaggacgctgtcgcgttcacctgtgaaccagaggcacagaataccacctacctttggtgggtcaacggacagtccctgcctgtctcaccgagactgcagctgtcaaacgggaataggactctgaccttgtttaacgtcacccggaacgacgcccgggcctacgtgtgcggcatccagaactccgtgagcgcaaaccggtctgacccagtgaccctggatgtgctgtacggccccgacactccgatcatttcaccccccgattcatcctacctgtccggcgctaacctcaacctctcatgccactccgcatccaaccccagcccgcaatattcgtggcgcattaacggaattcctcagcaacatacccaggtcctgttcattgcgaagatcacccctaacaacaacggaacctacgcctgctttgtgtcaaacctggccactggtagaaacaactccatcgtgaagtccattaccgtgtcggcgtccggaacttccccgggcctgagcgccggcgccaccgtgggaattatgatcggcgtgctcgtgggagtggccctgatcaggaagagaagaggatccggcgagggcagaggcagcctgctgacatgtggcgacgtggaagagaaccctggccccacccctggaacccagagccccttcttccttctgctgctgctgaccgtgctgactgtcgtgacaggctctggccacgccagctctacacctggcggcgagaaagagacaagcgccacccagagaagcagcgtgccaagcagcaccgagaagaacgccgtgtccatgaccagctccgtgctgagcagccactctcctggcagcggcagcagcacaacacagggccaggatgtgacactggcccctgccacagaacctgcctctggatctgccgccacctggggacaggacgtgacaagcgtgccagtgaccagacctgccctgggctctacaacaccccctgcccacgatgtgaccagcgcccctgataacaagcctgcccctggaagcacagcccctccagctcatggcgtgacctctgccccagataccagaccagccccaggatctacagccccacccgcacacggcgtgacaagtgcccctgacacaagacccgctccaggctctactgctcctcctgcccatggcgtgacaagcgctcccgatacaaggccagctcctggctccacagcaccaccagcacatggcgtgacatcagctcccgacactagacctgctcccggatcaaccgctccaccagctcacggcgtgaccagcgcacctgataccagacctgctctgggaagcaccgcccctcccgtgcacaatgtgacatctgcttccggcagcgccagcggctctgcctctacactggtgcacaacggcaccagcgccagagccacaacaaccccagccagcaagagcacccccttcagcatccctagccaccacagcgacacccctaccacactggccagccactccaccaagaccgatgcctctagcacccaccactccagcgtgccccctctgaccagcagcaaccacagcacaagcccccagctgtctaccggcgtctcattcttctttctgtccttccacatcagcaacctgcagttcaacagcagcctggaagatcccagcaccgactactaccaggaactgcagcgggatatcagcgagatgttcctgcaaatctacaagcagggcggcttcctgggcctgagcaacatcaagttcagacccggcagcgtggtggtgcagctgaccctggctttccgggaaggcaccatcaacgtgcacgacgtggaaacccagttcaaccagtacaagaccgaggccgccagccggtacaacctgaccatctccgatgtgtccgtgtccgacgtgcccttcccattctctgcccagtctggcgcaggcgtgccaggatggggaattgctctgctggtgctcgtgtgcgtgctggtggccctggccatcgtgtatctgattgccctggccgtgtgccagtgccggcggaagaattacggccagctggacatcttccccgccagagacacctaccaccccatgagcgagtaccccacataccacacccacggcagatacgtgccacccagctccaccgacagatccccctacgagaaagtgtctgccggcaacggcggcagctccctgagctacacaaatcctgccgtggccgctgcctccgccaacctg

SEQ ID NO: 35 - protein, 1085 aa, Artificial Sequence
  Synthetic Construct
MASESPSAPPHRWCIPWQRLLLTASLLTFWNPPTTAKLTIESTPFNVAEGKEVLLLVHNLPQHLFGYSWYKGERVDGNRQIIGYVIGTQQATPGPAYSGREIIYPNASLLIQNIIQNDTGFYTLHVIKSDLVNEEATGQFRVYPELPKPFITSNNSNPVEDEDAVALTCEPEIQNTTYLWWVNNQSLPVSPRLQLSNDNRTLTLLSVTRNDVGPYECGIQNKLSVDHSDPVILNVLYGPDDPTISPSYTYYRPGVNLSLSCHAASNPPAQYSWLIDGNIQQHTQELFISNITEKNSGLYTCQANNSASGHSRTTVKTITVSAELPKPSISSNNSKPVEDKDAVAFTCEPEAQNTTYLWWVNGQSLPVSPRLQLSNGNRTLTLFNVTRNDARAYVCGIQNSVSANRSDPVTLDVLYGPDTPIISPPDSSYLSGANLNLSCHSASNPSPQYSWRINGIPQQHTQVLFIAKITPNNNGTYACFVSNLATGRNNSIVKSITVSASGTSPGLSAGATVGIMIGVLVGVALIRKRRGSGEGRGSLLTCGDVEENPGPTPGTQSPFFLLLLLTVLTVVTGSGHASSTPGGEKETSATQRSSVPSSTEKNAVSMTSSVLSSHSPGSGSSTTQGQDVTLAPATEPASGSAATWGQDVTSVPVTRPALGSTTPPAHDVTSAPDNKPAPGSTAPPAHGVTSAPDTRPAPGSTAPPAHGVTSAPDTRPAPGSTAPPAHGVTSAPDTRPAPGSTAPPAHGVTSAPDTRPAPGSTAPPAHGVTSAPDTRPALGSTAPPVHNVTSASGSASGSASTLVHNGTSARATTTPASKSTPFSIPSHHSDTPTTLASHSTKTDASSTHHSSVPPLTSSNHSTSPQLSTGVSFFFLSFHISNLQFNSSLEDPSTDYYQELQRDISEMFLQIYKQGGFLGLSNIKFRPGSVVVQLTLAFREGTINVHDVETQFNQYKTEAASRYNLTISDVSVSDVPFPFSAQSGAGVPGWGIALLVLVCVLVALAIVYLIALAVCQCRRKNYGQLDIFPARDTYHPMSEYPTYHTHGRYVPPSSTDRSPYEKVSAGNGGSSLSYTNPAVAAASANL

SEQ ID NO: 36 - DNA, 3090 bp, Artificial Sequence
  Synthetic Construct
atggctagcacccctggaacccagagccccttcttccttctgctgctgctgaccgtgctgactgtcgtgacaggctctggccacgccagctctacacctggcggcgagaaagagacaagcgccacccagagaagcagcgtgccaagcagcaccgagaagaacgccgtgtccatgaccagctccgtgctgagcagccactctcctggcagcggcagcagcacaacacagggccaggatgtgacactggcccctgccacagaacctgcctctggatctgccgccacctggggacaggacgtgacaagcgtgccagtgaccagacctgccctgggctctacaacaccccctgcccacgatgtgaccagcgcccctgataacaagcctgcccctggaagcacagcccctccagctcatggcgtgacctctgccccagataccagaccagccccaggatctacagccccacccgcacacggcgtgacaagtgcccctgacacaagacccgctccaggctctactgctcctcctgcccatggcgtgacaagcgctcccgatacaaggccagctcctggctccacagcaccaccagcacatggcgtgacatcagctcccgacactagacctgctcccggatcaaccgctccaccagctcacggcgtgaccagcgcacctgataccagacctgctctgggaagcaccgcccctcccgtgcacaatgtgacatctgcttccggcagcgccagcggctctgcctctacactggtgcacaacggcaccagcgccagagccacaacaaccccagccagcaagagcacccccttcagcatccctagccaccacagcgacacccctaccacactggccagccactccaccaagaccgatgcctctagcacccaccactccagcgtgccccctctgaccagcagcaaccacagcacaagcccccagctgtctaccggcgtctcattcttctttctgtccttccacatcagcaacctgcagttcaacagcagcctggaagatcccagcaccgactactaccaggaactgcagcgggatatcagcgagatgttcctgcaaatctacaagcagggcggcttcctgggcctgagcaacatcaagttcagacccggcagcgtggtggtgcagctgaccctggctttccgggaaggcaccatcaacgtgcacgacgtggaaacccagttcaaccagtacaagaccgaggccgccagccggtacaacctgaccatctccgatgtgtccgtgtccgacgtgcccttcccattctctgcccagtctggcgcaggcgtgccaggatggggaattgctctgctggtgctcgtgtgcgtgctggtggccctggccatcgtgtatctgattgccctggccgtgtgccagtgccggcggaagaattacggccagctggacatcttccccgccagagacacctaccaccccatgagcgagtaccccacataccacacccacggcagatacgtgccacccagctccaccgacagatccccctacgagaaagtgtctgccggcaacggcggcagctccctgagctacacaaatcctgccgtggccgctgcctccgccaacctgggatccggcagaatcttcaacgcccactacgccggctacttcgccgacctgctgatccacgacatcgagacaaaccctggccccaagctgaccattgagagcactcccttcaacgtggctgaggggaaggaggtgctgctcctggtgcacaatctgccccagcacctgttcgggtactcctggtacaagggagaacgcgtggacgggaaccggcagatcataggctacgtcatcggaacccagcaggccacacccggtccagcgtacagcggccgggagattatctacccgaacgcctccctgctgatccaaaacatcatccagaacgacaccggtttctacactctgcacgtgattaagtcagatctggtcaacgaagaggccaccggccaattcagggtgtaccccgaactccctaagccgttcatcacctcgaacaacagcaacccggtcgaggatgaagatgcggtggccttgacgtgcgaacctgagatccagaacaccacctacttgtggtgggtgaacaatcagagcctgccagtctccccacgactccagctgtcgaacgacaacaggaccctgactttgctgtccgtgactcggaacgacgtgggcccttatgaatgcggtatccagaacaagctgtccgtggaccacagcgaccctgtgatcctgaacgtcctttacgggccggacgaccccaccatttccccgtcgtacacttactaccggccgggcgtgaacctgtccctgtcgtgccacgctgcctccaatccgccggcccagtactcctggctcatcgacggaaacatccagcagcacacccaagaactgttcatctccaacattaccgagaaaaactcgggactttacacctgtcaagccaacaattccgccagcggccactcccgcaccactgtcaaaactatcactgtgtccgccgaactcccgaagcccagcatcagctccaacaactcgaagcccgtggaggataaggacgctgtcgcgttcacctgtgaaccagaggcacagaataccacctacctttggtgggtcaacggacagtccctgcctgtctcaccgagactgcagctgtcaaacgggaataggactctgaccttgtttaacgtcacccggaacgacgcccgggcctacgtgtgcggcatccagaactccgtgagcgcaaaccggtctgacccagtgaccctggatgtgctgtacggccccgacactccgatcatttcaccccccgattcatcctacctgtccggcgctaacctcaacctctcatgccactccgcatccaaccccagcccgcaatattcgtggcgcattaacggaattcctcagcaacatacccaggtcctgttcattgcgaagatcacccctaacaacaacggaacctacgcctgctttgtgtcaaacctggccactggtagaaacaactccatcgtgaagtccattaccgtgtcggcgtcc

SEQ ID NO: 37 - protein, 1030 aa, Artificial Sequence
  Synthetic Construct
MASTPGTQSPFFLLLLLTVLTVVTGSGHASSTPGGEKETSATQRSSVPSSTEKNAVSMTSSVLSSHSPGSGSSTTQGQDVTLAPATEPASGSAATWGQDVTSVPVTRPALGSTTPPAHDVTSAPDNKPAPGSTAPPAHGVTSAPDTRPAPGSTAPPAHGVTSAPDTRPAPGSTAPPAHGVTSAPDTRPAPGSTAPPAHGVTSAPDTRPAPGSTAPPAHGVTSAPDTRPALGSTAPPVHNVTSASGSASGSASTLVHNGTSARATTTPASKSTPFSIPSHHSDTPTTLASHSTKTDASSTHHSSVPPLTSSNHSTSPQLSTGVSFFFLSFHISNLQFNSSLEDPSTDYYQELQRDISEMFLQIYKQGGFLGLSNIKFRPGSVVVQLTLAFREGTINVHDVETQFNQYKTEAASRYNLTISDVSVSDVPFPFSAQSGAGVPGWGIALLVLVCVLVALAIVYLIALAVCQCRRKNYGQLDIFPARDTYHPMSEYPTYHTHGRYVPPSSTDRSPYEKVSAGNGGSSLSYTNPAVAAASANLGSGRIFNAHYAGYFADLLIHDIETNPGPKLTIESTPFNVAEGKEVLLLVHNLPQHLFGYSWYKGERVDGNRQIIGYVIGTQQATPGPAYSGREIIYPNASLLIQNIIQNDTGFYTLHVIKSDLVNEEATGQFRVYPELPKPFITSNNSNPVEDEDAVALTCEPEIQNTTYLWWVNNQSLPVSPRLQLSNDNRTLTLLSVTRNDVGPYECGIQNKLSVDHSDPVILNVLYGPDDPTISPSYTYYRPGVNLSLSCHAASNPPAQYSWLIDGNIQQHTQELFISNITEKNSGLYTCQANNSASGHSRTTVKTITVSAELPKPSISSNNSKPVEDKDAVAFTCEPEAQNTTYLWWVNGQSLPVSPRLQLSNGNRTLTLFNVTRNDARAYVCGIQNSVSANRSDPVTLDVLYGPDTPIISPPDSSYLSGANLNLSCHSASNPSPQYSWRINGIPQQHTQVLFIAKITPNNNGTYACFVSNLATGRNNSIVKSITVSAS

SEQ ID NO: 38 - DNA, 4143 bp, Artificial Sequence
  Synthetic Construct
atggctagcaagctgaccattgagagcactcccttcaacgtggctgaggggaaggaggtgctgctcctggtgcacaatctgccccagcacctgttcgggtactcctggtacaagggagaacgcgtggacgggaaccggcagatcataggctacgtcatcggaacccagcaggccacacccggtccagcgtacagcggccgggagattatctacccgaacgcctccctgctgatccaaaacatcatccagaacgacaccggtttctacactctgcacgtgattaagtcagatctggtcaacgaagaggccaccggccaattcagggtgtaccccgaactccctaagccgttcatcacctcgaacaacagcaacccggtcgaggatgaagatgcggtggccttgacgtgcgaacctgagatccagaacaccacctacttgtggtgggtgaacaatcagagcctgccagtctccccacgactccagctgtcgaacgacaacaggaccctgactttgctgtccgtgactcggaacgacgtgggcccttatgaatgcggtatccagaacaagctgtccgtggaccacagcgaccctgtgatcctgaacgtcctttacgggccggacgaccccaccatttccccgtcgtacacttactaccggccgggcgtgaacctgtccctgtcgtgccacgctgcctccaatccgccggcccagtactcctggctcatcgacggaaacatccagcagcacacccaagaactgttcatctccaacattaccgagaaaaactcgggactttacacctgtcaagccaacaattccgccagcggccactcccgcaccactgtcaaaactatcactgtgtccgccgaactcccgaagcccagcatcagctccaacaactcgaagcccgtggaggataaggacgctgtcgcgttcacctgtgaaccagaggcacagaataccacctacctttggtgggtcaacggacagtccctgcctgtctcaccgagactgcagctgtcaaacgggaataggactctgaccttgtttaacgtcacccggaacgacgcccgggcctacgtgtgcggcatccagaactccgtgagcgcaaaccggtctgacccagtgaccctggatgtgctgtacggccccgacactccgatcatttcaccccccgattcatcctacctgtccggcgctaacctcaacctctcatgccactccgcatccaaccccagcccgcaatattcgtggcgcattaacggaattcctcagcaacatacccaggtcctgttcattgcgaagatcacccctaacaacaacggaacctacgcctgctttgtgtcaaacctggccactggtagaaacaactccatcgtgaagtccattaccgtgtcggcgtccggatccggcgagggcagaggcagcctgctgacatgtggcgacgtggaagagaaccctggccccggagctgccccggagccggagaggacccccgttggccagggatcgtgggcccatccgggacgcaccaggggaccatccgacaggggattctgtgtggtgtcaccggccaggccagcagaagaggcaaccagcctcgagggagcgttgtctggaaccagacattcccacccgtcggtgggccggcagcaccacgcgggaccaccgtccacttccagaccgccacggccatgggacaccccttgcccgcctgtgtatgccgagactaaacacttcctgtactcatccggagacaaggaacagcttcggccgtccttcctcctgtcgtcgctcagaccgagcctgaccggagcacgcagattggtggaaactatcttccttgggtcacgtccgtggatgccaggtaccccacggcgcctcccgcgcctcccacagagatactggcagatgcggcctctgttcctggaattgctgggaaaccacgctcagtgcccgtacggagtcctgctcaagactcactgccctctgagggcggcggtcactccggcggccggagtgtgcgcacgggagaagccccagggaagcgtggcagctccggaagaggaggacaccgatccgcgccgcctcgtgcaacttctgcgccagcactcctcgccctggcaagtctacgggttcgtccgcgcctgcctgcgccgcctggtgccgcctgggctctggggttcccggcataacgagcgccgcttcctgagaaatactaagaagtttatctcacttggaaaacatgccaagttgtcgctgcaagaactcacgtggaagatgtcagtccgcgattgcgcctggctgcgccgctcgccgggcgtcgggtgtgttccagctgcagaacaccgcctgagagaagaaattctggccaaatttctgcattggctgatgtcagtgtacgtggtcgagctgctgcgctcctttttctacgtcactgagactacctttcaaaagaaccgcctgttcttctaccgcaaatctgtgtggagcaagctgcagtcaatcggcattcgccagcatctgaagagggtgcagctgcgggaactttccgaggcagaagtccgccagcaccgggaggcccggccggcgcttctcacgtcgcgtctgagattcatcccaaagcccgacgggctgaggcctatcgtcaacatggattacgtcgtgggcgctcgcacctttcgccgtgaaaagcgggccgaacgcttgacctcacgggtgaaggccctcttctccgtgctgaactacgagagagcaagacggcctggcctgctgggagcttcggtgctgggactggacgatatccaccgggcttggcggacctttgttctccgggtgagagcccaagaccctccgccggaactgtacttcgtgaaggtggcgatcaccggagcctatgatactattccgcaagatcgactcaccgaagtcatcgcctcgatcatcaaaccgcagaacacttactgcgtcaggcggtacgccgtggtccagaaggccgcgcatggccacgtgagaaaggcgttcaagtcgcacgtgtccactctcaccgacctccagccttacatgaggcaattcgttgcgcatttgcaagagacttcgcccctgagagatgcggtggtcatcgagcagagctccagcctgaacgaagcgagcagcggtctgtttgacgtgttcctccgcttcatgtgtcatcacgcggtgcgaatcaggggaaaatcatacgtgcagtgccagggaatcccacaaggcagcattctgtcgactctcttgtgttccctttgctacggcgatatggaaaacaagctgttcgctgggatcagacgggacgggttgctgctcagactggtggacgacttcctgctggtgactccgcacctcactcacgccaaaacctttctccgcactctggtgaggggagtgccagaatacggctgtgtggtcaatctccggaaaactgtggtgaatttccctgtcgaggatgaggcactcggaggaaccgcatttgtccaaatgccagcacatggcctgttcccatggtgcggtctgctgctggacacccgaactcttgaagtgcagtccgactactccagctatgcccggacgagcatccgcgccagcctcactttcaatcgcggctttaaggccggacgaaacatgcgcagaaagcttttcggagtcctccggcttaaatgccattcgctctttctcgatctccaagtcaattcgctgcagaccgtgtgcacgaacatctacaagatcctgctgctccaagcctaccggttccacgcttgcgtgcttcagctgccgtttcaccaacaggtgtggaagaacccgaccttctttctgcgggtcattagcgatactgcctccctgtgttactcaatcctcaaggcaaagaacgccggaatgtcgctgggtgcgaaaggagccgcgggacctcttcctagcgaagcggtgcagtggctctgccaccaggctttcctcctgaagctgaccaggcacagagtgacctacgtcccgctgctgggctcgctgcgcactgcacagacccagctgtctagaaaactccccggcaccaccctgaccgctctggaagccgccgccaacccagcattgccgtcagatttcaagaccatcttggac

SEQ ID NO: 39 - protein, 1381 aa, Artificial Sequence
  Synthetic Construct
MASKLTIESTPFNVAEGKEVLLLVHNLPQHLFGYSWYKGERVDGNRQIIGYVIGTQQATPGPAYSGREIIYPNASLLIQNIIQNDTGFYTLHVIKSDLVNEEATGQFRVYPELPKPFITSNNSNPVEDEDAVALTCEPEIQNTTYLWWVNNQSLPVSPRLQLSNDNRTLTLLSVTRNDVGPYECGIQNKLSVDHSDPVILNVLYGPDDPTISPSYTYYRPGVNLSLSCHAASNPPAQYSWLIDGNIQQHTQELFISNITEKNSGLYTCQANNSASGHSRTTVKTITVSAELPKPSISSNNSKPVEDKDAVAFTCEPEAQNTTYLWWVNGQSLPVSPRLQLSNGNRTLTLFNVTRNDARAYVCGIQNSVSANRSDPVTLDVLYGPDTPIISPPDSSYLSGANLNLSCHSASNPSPQYSWRINGIPQQHTQVLFIAKITPNNNGTYACFVSNLATGRNNSIVKSITVSASGSGEGRGSLLTCGDVEENPGPGAAPEPERTPVGQGSWAHPGRTRGPSDRGFCVVSPARPAEEATSLEGALSGTRHSHPSVGRQHHAGPPSTSRPPRPWDTPCPPVYAETKHFLYSSGDKEQLRPSFLLSSLRPSLTGARRLVETIFLGSRPWMPGTPRRLPRLPQRYWQMRPLFLELLGNHAQCPYGVLLKTHCPLRAAVTPAAGVCAREKPQGSVAAPEEEDTDPRRLVQLLRQHSSPWQVYGFVRACLRRLVPPGLWGSRHNERRFLRNTKKFISLGKHAKLSLQELTWKMSVRDCAWLRRSPGVGCVPAAEHRLREEILAKFLHWLMSVYVVELLRSFFYVTETTFQKNRLFFYRKSVWSKLQSIGIRQHLKRVQLRELSEAEVRQHREARPALLTSRLRFIPKPDGLRPIVNMDYVVGARTFRREKRAERLTSRVKALFSVLNYERARRPGLLGASVLGLDDIHRAWRTFVLRVRAQDPPPELYFVKVAITGAYDTIPQDRLTEVIASIIKPQNTYCVRRYAVVQKAAHGHVRKAFKSHVSTLTDLQPYMRQFVAHLQETSPLRDAVVIEQSSSLNEASSGLFDVFLRFMCHHAVRIRGKSYVQCQGIPQGSILSTLLCSLCYGDMENKLFAGIRRDGLLLRLVDDFLLVTPHLTHAKTFLRTLVRGVPEYGCVVNLRKTVVNFPVEDEALGGTAFVQMPAHGLFPWCGLLLDTRTLEVQSDYSSYARTSIRASLTFNRGFKAGRNMRRKLFGVLRLKCHSLFLDLQVNSLQTVCTNIYKILLLQAYRFHACVLQLPFHQQVWKNPTFFLRVISDTASLCYSILKAKNAGMSLGAKGAAGPLPSEAVQWLCHQAFLLKLTRHRVTYVPLLGSLRTAQTQLSRKLPGTTLTALEAAANPALPSDFKTILD

SEQ ID NO: 40 - DNA, 4323 bp, Artificial Sequence
  Synthetic Construct
atggctagcggagctgccccggagccggagaggacccccgttggccagggatcgtgggcccatccgggacgcaccaggggaccatccgacaggggattctgtgtggtgtcaccggccaggccagcagaagaggcaaccagcctcgagggagcgttgtctggaaccagacattcccacccgtcggtgggccggcagcaccacgcgggaccaccgtccacttccagaccgccacggccatgggacaccccttgcccgcctgtgtatgccgagactaaacacttcctgtactcatccggagacaaggaacagcttcggccgtccttcctcctgtcgtcgctcagaccgagcctgaccggagcacgcagattggtggaaactatcttccttgggtcacgtccgtggatgccaggtaccccacggcgcctcccgcgcctcccacagagatactggcagatgcggcctctgttcctggaattgctgggaaaccacgctcagtgcccgtacggagtcctgctcaagactcactgccctctgagggcggcggtcactccggcggccggagtgtgcgcacgggagaagccccagggaagcgtggcagctccggaagaggaggacaccgatccgcgccgcctcgtgcaacttctgcgccagcactcctcgccctggcaagtctacgggttcgtccgcgcctgcctgcgccgcctggtgccgcctgggctctggggttcccggcataacgagcgccgcttcctgagaaatactaagaagtttatctcacttggaaaacatgccaagttgtcgctgcaagaactcacgtggaagatgtcagtccgcgattgcgcctggctgcgccgctcgccgggcgtcgggtgtgttccagctgcagaacaccgcctgagagaagaaattctggccaaatttctgcattggctgatgtcagtgtacgtggtcgagctgctgcgctcctttttctacgtcactgagactacctttcaaaagaaccgcctgttcttctaccgcaaatctgtgtggagcaagctgcagtcaatcggcattcgccagcatctgaagagggtgcagctgcgggaactttccgaggcagaagtccgccagcaccgggaggcccggccggcgcttctcacgtcgcgtctgagattcatcccaaagcccgacgggctgaggcctatcgtcaacatggattacgtcgtgggcgctcgcacctttcgccgtgaaaagcgggccgaacgcttgacctcacgggtgaaggccctcttctccgtgctgaactacgagagagcaagacggcctggcctgctgggagcttcggtgctgggactggacgatatccaccgggcttggcggacctttgttctccgggtgagagcccaagaccctccgccggaactgtacttcgtgaaggtggcgatcaccggagcctatgatactattccgcaagatcgactcaccgaagtcatcgcctcgatcatcaaaccgcagaacacttactgcgtcaggcggtacgccgtggtccagaaggccgcgcatggccacgtgagaaaggcgttcaagtcgcacgtgtccactctcaccgacctccagccttacatgaggcaattcgttgcgcatttgcaagagacttcgcccctgagagatgcggtggtcatcgagcagagctccagcctgaacgaagcgagcagcggtctgtttgacgtgttcctccgcttcatgtgtcatcacgcggtgcgaatcaggggaaaatcatacgtgcagtgccagggaatcccacaaggcagcattctgtcgactctcttgtgttccctttgctacggcgatatggaaaacaagctgttcgctgggatcagacgggacgggttgctgctcagactggtggacgacttcctgctggtgactccgcacctcactcacgccaaaacctttctccgcactctggtgaggggagtgccagaatacggctgtgtggtcaatctccggaaaactgtggtgaatttccctgtcgaggatgaggcactcggaggaaccgcatttgtccaaatgccagcacatggcctgttcccatggtgcggtctgctgctggacacccgaactcttgaagtgcagtccgactactccagctatgcccggacgagcatccgcgccagcctcactttcaatcgcggctttaaggccggacgaaacatgcgcagaaagcttttcggagtcctccggcttaaatgccattcgctctttctcgatctccaagtcaattcgctgcagaccgtgtgcacgaacatctacaagatcctgctgctccaagcctaccggttccacgcttgcgtgcttcagctgccgtttcaccaacaggtgtggaagaacccgaccttctttctgcgggtcattagcgatactgcctccctgtgttactcaatcctcaaggcaaagaacgccggaatgtcgctgggtgcgaaaggagccgcgggacctcttcctagcgaagcggtgcagtggctctgccaccaggctttcctcctgaagctgaccaggcacagagtgacctacgtcccgctgctgggctcgctgcgcactgcacagacccagctgtctagaaaactccccggcaccaccctgaccgctctggaagccgccgccaacccagcattgccgtcagatttcaagaccatcttggacggatccggccagtgcaccaattacgccctgctgaagctggccggcgacgtggaatctaaccctggccctgaatcgccaagcgcaccccctcatcggtggtgcatcccttggcaacgcctcctcctgaccgcctcactgctgactttctggaacccgccgaccaccgcaaagctgaccattgagagcactcccttcaacgtggctgaggggaaggaggtgctgctcctggtgcacaatctgccccagcacctgttcgggtactcctggtacaagggagaacgcgtggacgggaaccggcagatcataggctacgtcatcggaacccagcaggccacacccggtccagcgtacagcggccgggagattatctacccgaacgcctccctgctgatccaaaacatcatccagaacgacaccggtttctacactctgcacgtgattaagtcagatctggtcaacgaagaggccaccggccaattcagggtgtaccccgaactccctaagccgttcatcacctcgaacaacagcaacccggtcgaggatgaagatgcggtggccttgacgtgcgaacctgagatccagaacaccacctacttgtggtgggtgaacaatcagagcctgccagtctccccacgactccagctgtcgaacgacaacaggaccctgactttgctgtccgtgactcggaacgacgtgggcccttatgaatgcggtatccagaacaagctgtccgtggaccacagcgaccctgtgatcctgaacgtcctttacgggccggacgaccccaccatttccccgtcgtacacttactaccggccgggcgtgaacctgtccctgtcgtgccacgctgcctccaatccgccggcccagtactcctggctcatcgacggaaacatccagcagcacacccaagaactgttcatctccaacattaccgagaaaaactcgggactttacacctgtcaagccaacaattccgccagcggccactcccgcaccactgtcaaaactatcactgtgtccgccgaactcccgaagcccagcatcagctccaacaactcgaagcccgtggaggataaggacgctgtcgcgttcacctgtgaaccagaggcacagaataccacctacctttggtgggtcaacggacagtccctgcctgtctcaccgagactgcagctgtcaaacgggaataggactctgaccttgtttaacgtcacccggaacgacgcccgggcctacgtgtgcggcatccagaactccgtgagcgcaaaccggtctgacccagtgaccctggatgtgctgtacggccccgacactccgatcatttcaccccccgattcatcctacctgtccggcgctaacctcaacctctcatgccactccgcatccaaccccagcccgcaatattcgtggcgcattaacggaattcctcagcaacatacccaggtcctgttcattgcgaagatcacccctaacaacaacggaacctacgcctgctttgtgtcaaacctggccactggtagaaacaactccatcgtgaagtccattaccgtgtcggcgtccggaacttccccgggcctgagcgccggcgccaccgtgggaattatgatcggcgtgctcgtgggagtggccctgatc

SEQ ID NO: 41 - protein, 1441 aa, Artificial Sequence
  Synthetic Construct
MASGAAPEPERTPVGQGSWAHPGRTRGPSDRGFCVVSPARPAEEATSLEGALSGTRHSHPSVGRQHHAGPPSTSRPPRPWDTPCPPVYAETKHFLYSSGDKEQLRPSFLLSSLRPSLTGARRLVETIFLGSRPWMPGTPRRLPRLPQRYWQMRPLFLELLGNHAQCPYGVLLKTHCPLRAAVTPAAGVCAREKPQGSVAAPEEEDTDPRRLVQLLRQHSSPWQVYGFVRACLRRLVPPGLWGSRHNERRFLRNTKKFISLGKHAKLSLQELTWKMSVRDCAWLRRSPGVGCVPAAEHRLREEILAKFLHWLMSVYVVELLRSFFYVTETTFQKNRLFFYRKSVWSKLQSIGIRQHLKRVQLRELSEAEVRQHREARPALLTSRLRFIPKPDGLRPIVNMDYVVGARTFRREKRAERLTSRVKALFSVLNYERARRPGLLGASVLGLDDIHRAWRTFVLRVRAQDPPPELYFVKVAITGAYDTIPQDRLTEVIASIIKPQNTYCVRRYAVVQKAAHGHVRKAFKSHVSTLTDLQPYMRQFVAHLQETSPLRDAVVIEQSSSLNEASSGLFDVFLRFMCHHAVRIRGKSYVQCQGIPQGSILSTLLCSLCYGDMENKLFAGIRRDGLLLRLVDDFLLVTPHLTHAKTFLRTLVRGVPEYGCVVNLRKTVVNFPVEDEALGGTAFVQMPAHGLFPWCGLLLDTRTLEVQSDYSSYARTSIRASLTFNRGFKAGRNMRRKLFGVLRLKCHSLFLDLQVNSLQTVCTNIYKILLLQAYRFHACVLQLPFHQQVWKNPTFFLRVISDTASLCYSILKAKNAGMSLGAKGAAGPLPSEAVQWLCHQAFLLKLTRHRVTYVPLLGSLRTAQTQLSRKLPGTTLTALEAAANPALPSDFKTILDGSGQCTNYALLKLAGDVESNPGPESPSAPPHRWCIPWQRLLLTASLLTFWNPPTTAKLTIESTPFNVAEGKEVLLLVHNLPQHLFGYSWYKGERVDGNRQIIGYVIGTQQATPGPAYSGREIIYPNASLLIQNIIQNDTGFYTLHVIKSDLVNEEATGQFRVYPELPKPFITSNNSNPVEDEDAVALTCEPEIQNTTYLWWVNNQSLPVSPRLQLSNDNRTLTLLSVTRNDVGPYECGIQNKLSVDHSDPVILNVLYGPDDPTISPSYTYYRPGVNLSLSCHAASNPPAQYSWLIDGNIQQHTQELFISNITEKNSGLYTCQANNSASGHSRTTVKTITVSAELPKPSISSNNSKPVEDKDAVAFTCEPEAQNTTYLWWVNGQSLPVSPRLQLSNGNRTLTLFNVTRNDARAYVCGIQNSVSANRSDPVTLDVLYGPDTPIISPPDSSYLSGANLNLSCHSASNPSPQYSWRINGIPQQHTQVLFIAKITPNNNGTYACFVSNLATGRNNSIVKSITVSASGTSPGLSAGATVGIMIGVLVGVALI

SEQ ID NO: 42 - DNA, 6009 bp, Artificial Sequence
  Synthetic Construct
atggctagcacccctggaacccagagccccttcttccttctgctgctgctgaccgtgctgactgtcgtgacaggctctggccacgccagctctacacctggcggcgagaaagagacaagcgccacccagagaagcagcgtgccaagcagcaccgagaagaacgccgtgtccatgaccagctccgtgctgagcagccactctcctggcagcggcagcagcacaacacagggccaggatgtgacactggcccctgccacagaacctgcctctggatctgccgccacctggggacaggacgtgacaagcgtgccagtgaccagacctgccctgggctctacaacaccccctgcccacgatgtgaccagcgcccctgataacaagcctgcccctggaagcacagcccctccagctcatggcgtgacctctgccccagataccagaccagccccaggatctacagccccacccgcacacggcgtgacaagtgcccctgacacaagacccgctccaggctctactgctcctcctgcccatggcgtgacaagcgctcccgatacaaggccagctcctggctccacagcaccaccagcacatggcgtgacatcagctcccgacactagacctgctcccggatcaaccgctccaccagctcacggcgtgaccagcgcacctgataccagacctgctctgggaagcaccgcccctcccgtgcacaatgtgacatctgcttccggcagcgccagcggctctgcctctacactggtgcacaacggcaccagcgccagagccacaacaaccccagccagcaagagcacccccttcagcatccctagccaccacagcgacacccctaccacactggccagccactccaccaagaccgatgcctctagcacccaccactccagcgtgccccctctgaccagcagcaaccacagcacaagcccccagctgtctaccggcgtctcattcttctttctgtccttccacatcagcaacctgcagttcaacagcagcctggaagatcccagcaccgactactaccaggaactgcagcgggatatcagcgagatgttcctgcaaatctacaagcagggcggcttcctgggcctgagcaacatcaagttcagacccggcagcgtggtggtgcagctgaccctggctttccgggaaggcaccatcaacgtgcacgacgtggaaacccagttcaaccagtacaagaccgaggccgccagccggtacaacctgaccatctccgatgtgtccgtgtccgacgtgcccttcccattctctgcccagtctggcgcaggcgtgccaggatggggaattgctctgctggtgctcgtgtgcgtgctggtggccctggccatcgtgtatctgattgccctggccgtgtgccagtgccggcggaagaattacggccagctggacatcttccccgccagagacacctaccaccccatgagcgagtaccccacataccacacccacggcagatacgtgccacccagctccaccgacagatccccctacgagaaagtgtctgccggcaacggcggcagctccctgagctacacaaatcctgccgtggccgctgcctccgccaacctgggatccggcacaatcctgtctgagggcgccaccaacttcagcctgctgaaactggccggcgacgtggaactgaaccctggccctggagctgccccggagccggagaggacccccgttggccagggatcgtgggcccatccgggacgcaccaggggaccatccgacaggggattctgtgtggtgtcaccggccaggccagcagaagaggcaaccagcctcgagggagcgttgtctggaaccagacattcccacccgtcggtgggccggcagcaccacgcgggaccaccgtccacttccagaccgccacggccatgggacaccccttgcccgcctgtgtatgccgagactaaacacttcctgtactcatccggagacaaggaacagcttcggccgtccttcctcctgtcgtcgctcagaccgagcctgaccggagcacgcagattggtggaaactatcttccttgggtcacgtccgtggatgccaggtaccccacggcgcctcccgcgcctcccacagagatactggcagatgcggcctctgttcctggaattgctgggaaaccacgctcagtgcccgtacggagtcctgctcaagactcactgccctctgagggcggcggtcactccggcggccggagtgtgcgcacgggagaagccccagggaagcgtggcagctccggaagaggaggacaccgatccgcgccgcctcgtgcaacttctgcgccagcactcctcgccctggcaagtctacgggttcgtccgcgcctgcctgcgccgcctggtgccgcctgggctctggggttcccggcataacgagcgccgcttcctgagaaatactaagaagtttatctcacttggaaaacatgccaagttgtcgctgcaagaactcacgtggaagatgtcagtccgcgattgcgcctggctgcgccgctcgccgggcgtcgggtgtgttccagctgcagaacaccgcctgagagaagaaattctggccaaatttctgcattggctgatgtcagtgtacgtggtcgagctgctgcgctcctttttctacgtcactgagactacctttcaaaagaaccgcctgttcttctaccgcaaatctgtgtggagcaagctgcagtcaatcggcattcgccagcatctgaagagggtgcagctgcgggaactttccgaggcagaagtccgccagcaccgggaggcccggccggcgcttctcacgtcgcgtctgagattcatcccaaagcccgacgggctgaggcctatcgtcaacatggattacgtcgtgggcgctcgcacctttcgccgtgaaaagcgggccgaacgcttgacctcacgggtgaaggccctcttctccgtgctgaactacgagagagcaagacggcctggcctgctgggagcttcggtgctgggactggacgatatccaccgggcttggcggacctttgttctccgggtgagagcccaagaccctccgccggaactgtacttcgtgaaggtggcgatcaccggagcctatgatactattccgcaagatcgactcaccgaagtcatcgcctcgatcatcaaaccgcagaacacttactgcgtcaggcggtacgccgtggtccagaaggccgcgcatggccacgtgagaaaggcgttcaagtcgcacgtgtccactctcaccgacctccagccttacatgaggcaattcgttgcgcatttgcaagagacttcgcccctgagagatgcggtggtcatcgagcagagctccagcctgaacgaagcgagcagcggtctgtttgacgtgttcctccgcttcatgtgtcatcacgcggtgcgaatcaggggaaaatcatacgtgcagtgccagggaatcccacaaggcagcattctgtcgactctcttgtgttccctttgctacggcgatatggaaaacaagctgttcgctgggatcagacgggacgggttgctgctcagactggtggacgacttcctgctggtgactccgcacctcactcacgccaaaacctttctccgcactctggtgaggggagtgccagaatacggctgtgtggtcaatctccggaaaactgtggtgaatttccctgtcgaggatgaggcactcggaggaaccgcatttgtccaaatgccagcacatggcctgttcccatggtgcggtctgctgctggacacccgaactcttgaagtgcagtccgactactccagctatgcccggacgagcatccgcgccagcctcactttcaatcgcggctttaaggccggacgaaacatgcgcagaaagcttttcggagtcctccggcttaaatgccattcgctctttctcgatctccaagtcaattcgctgcagaccgtgtgcacgaacatctacaagatcctgctgctccaagcctaccggttccacgcttgcgtgcttcagctgccgtttcaccaacaggtgtggaagaacccgaccttctttctgcgggtcattagcgatactgcctccctgtgttactcaatcctcaaggcaaagaacgccggaatgtcgctgggtgcgaaaggagccgcgggacctcttcctagcgaagcggtgcagtggctctgccaccaggctttcctcctgaagctgaccaggcacagagtgacctacgtcccgctgctgggctcgctgcgcactgcacagacccagctgtctagaaaactccccggcaccaccctgaccgctctggaagccgccgccaacccagcattgccgtcagatttcaagaccatcttggacggatccggccagtgcaccaattacgccctgctgaagctggccggcgacgtggaatctaaccctggccctgaatcgccaagcgcaccccctcatcggtggtgcatcccttggcaacgcctcctcctgaccgcctcactgctgactttctggaacccgccgaccaccgcaaagctgaccattgagagcactcccttcaacgtggctgaggggaaggaggtgctgctcctggtgcacaatctgccccagcacctgttcgggtactcctggtacaagggagaacgcgtggacgggaaccggcagatcataggctacgtcatcggaacccagcaggccacacccggtccagcgtacagcggccgggagattatctacccgaacgcctccctgctgatccaaaacatcatccagaacgacaccggtttctacactctgcacgtgattaagtcagatctggtcaacgaagaggccaccggccaattcagggtgtaccccgaactccctaagccgttcatcacctcgaacaacagcaacccggtcgaggatgaagatgcggtggccttgacgtgcgaacctgagatccagaacaccacctacttgtggtgggtgaacaatcagagcctgccagtctccccacgactccagctgtcgaacgacaacaggaccctgactttgctgtccgtgactcggaacgacgtgggcccttatgaatgcggtatccagaacaagctgtccgtggaccacagcgaccctgtgatcctgaacgtcctttacgggccggacgaccccaccatttccccgtcgtacacttactaccggccgggcgtgaacctgtccctgtcgtgccacgctgcctccaatccgccggcccagtactcctggctcatcgacggaaacatccagcagcacacccaagaactgttcatctccaacattaccgagaaaaactcgggactttacacctgtcaagccaacaattccgccagcggccactcccgcaccactgtcaaaactatcactgtgtccgccgaactcccgaagcccagcatcagctccaacaactcgaagcccgtggaggataaggacgctgtcgcgttcacctgtgaaccagaggcacagaataccacctacctttggtgggtcaacggacagtccctgcctgtctcaccgagactgcagctgtcaaacgggaataggactctgaccttgtttaacgtcacccggaacgacgcccgggcctacgtgtgcggcatccagaactccgtgagcgcaaaccggtctgacccagtgaccctggatgtgctgtacggccccgacactccgatcatttcaccccccgattcatcctacctgtccggcgctaacctcaacctctcatgccactccgcatccaaccccagcccgcaatattcgtggcgcattaacggaattcctcagcaacatacccaggtcctgttcattgcgaagatcacccctaacaacaacggaacctacgcctgctttgtgtcaaacctggccactggtagaaacaactccatcgtgaagtccattaccgtgtcggcgtccggaacttccccgggcctgagcgccggcgccaccgtgggaattatgatcggcgtgctcgtgggagtggccctgatc

SEQ ID NO: 43 - protein, 2003 aa, Artificial Sequence
  Synthetic Construct
MASTPGTQSPFFLLLLLTVLTVVTGSGHASSTPGGEKETSATQRSSVPSSTEKNAVSMTSSVLSSHSPGSGSSTTQGQDVTLAPATEPASGSAATWGQDVTSVPVTRPALGSTTPPAHDVTSAPDNKPAPGSTAPPAHGVTSAPDTRPAPGSTAPPAHGVTSAPDTRPAPGSTAPPAHGVTSAPDTRPAPGSTAPPAHGVTSAPDTRPAPGSTAPPAHGVTSAPDTRPALGSTAPPVHNVTSASGSASGSASTLVHNGTSARATTTPASKSTPFSIPSHHSDTPTTLASHSTKTDASSTHHSSVPPLTSSNHSTSPQLSTGVSFFFLSFHISNLQFNSSLEDPSTDYYQELQRDISEMFLQIYKQGGFLGLSNIKFRPGSVVVQLTLAFREGTINVHDVETQFNQYKTEAASRYNLTISDVSVSDVPFPFSAQSGAGVPGWGIALLVLVCVLVALAIVYLIALAVCQCRRKNYGQLDIFPARDTYHPMSEYPTYHTHGRYVPPSSTDRSPYEKVSAGNGGSSLSYTNPAVAAASANLGSGTILSEGATNFSLLKLAGDVELNPGPGAAPEPERTPVGQGSWAHPGRTRGPSDRGFCVVSPARPAEEATSLEGALSGTRHSHPSVGRQHHAGPPSTSRPPRPWDTPCPPVYAETKHFLYSSGDKEQLRPSFLLSSLRPSLTGARRLVETIFLGSRPWMPGTPRRLPRLPQRYWQMRPLFLELLGNHAQCPYGVLLKTHCPLRAAVTPAAGVCAREKPQGSVAAPEEEDTDPRRLVQLLRQHSSPWQVYGFVRACLRRLVPPGLWGSRHNERRFLRNTKKFISLGKHAKLSLQELTWKMSVRDCAWLRRSPGVGCVPAAEHRLREEILAKFLHWLMSVYVVELLRSFFYVTETTFQKNRLFFYRKSVWSKLQSIGIRQHLKRVQLRELSEAEVRQHREARPALLTSRLRFIPKPDGLRPIVNMDYVVGARTFRREKRAERLTSRVKALFSVLNYERARRPGLLGASVLGLDDIHRAWRTFVLRVRAQDPPPELYFVKVAITGAYDTIPQDRLTEVIASIIKPQNTYCVRRYAVVQKAAHGHVRKAFKSHVSTLTDLQPYMRQFVAHLQETSPLRDAVVIEQSSSLNEASSGLFDVFLRFMCHHAVRIRGKSYVQCQGIPQGSILSTLLCSLCYGDMENKLFAGIRRDGLLLRLVDDFLLVTPHLTHAKTFLRTLVRGVPEYGCVVNLRKTVVNFPVEDEALGGTAFVQMPAHGLFPWCGLLLDTRTLEVQSDYSSYARTSIRASLTFNRGFKAGRNMRRKLFGVLRLKCHSLFLDLQVNSLQTVCTNIYKILLLQAYRFHACVLQLPFHQQVWKNPTFFLRVISDTASLCYSILKAKNAGMSLGAKGAAGPLPSEAVQWLCHQAFLLKLTRHRVTYVPLLGSLRTAQTQLSRKLPGTTLTALEAAANPALPSDFKTILDGSGQCTNYALLKLAGDVESNPGPESPSAPPHRWCIPWQRLLLTASLLTFWNPPTTAKLTIESTPFNVAEGKEVLLLVHNLPQHLFGYSWYKGERVDGNRQIIGYVIGTQQATPGPAYSGREIIYPNASLLIQNIIQNDTGFYTLHVIKSDLVNEEATGQFRVYPELPKPFITSNNSNPVEDEDAVALTCEPEIQNTTYLWWVNNQSLPVSPRLQLSNDNRTLTLLSVTRNDVGPYECGIQNKLSVDHSDPVILNVLYGPDDPTISPSYTYYRPGVNLSLSCHAASNPPAQYSWLIDGNIQQHTQELFISNITEKNSGLYTCQANNSASGHSRTTVKTITVSAELPKPSISSNNSKPVEDKDAVAFTCEPEAQNTTYLWWVNGQSLPVSPRLQLSNGNRTLTLFNVTRNDARAYVCGIQNSVSANRSDPVTLDVLYGPDTPIISPPDSSYLSGANLNLSCHSASNPSPQYSWRINGIPQQHTQVLFIAKITPNNNGTYACFVSNLATGRNNSIVKSITVSASGTSPGLSAGATVGIMIGVLVGVALI

SEQ ID NO: 44 - DNA, 6003 bp, Artificial Sequence
  Synthetic Construct
atggctagcgaatcgccaagcgcaccccctcatcggtggtgcatcccttggcaacgcctcctcctgaccgcctcactgctgactttctggaacccgccgaccaccgcaaagctgaccattgagagcactcccttcaacgtggctgaggggaaggaggtgctgctcctggtgcacaatctgccccagcacctgttcgggtactcctggtacaagggagaacgcgtggacgggaaccggcagatcataggctacgtcatcggaacccagcaggccacacccggtccagcgtacagcggccgggagattatctacccgaacgcctccctgctgatccaaaacatcatccagaacgacaccggtttctacactctgcacgtgattaagtcagatctggtcaacgaagaggccaccggccaattcagggtgtaccccgaactccctaagccgttcatcacctcgaacaacagcaacccggtcgaggatgaagatgcggtggccttgacgtgcgaacctgagatccagaacaccacctacttgtggtgggtgaacaatcagagcctgccagtctccccacgactccagctgtcgaacgacaacaggaccctgactttgctgtccgtgactcggaacgacgtgggcccttatgaatgcggtatccagaacaagctgtccgtggaccacagcgaccctgtgatcctgaacgtcctttacgggccggacgaccccaccatttccccgtcgtacacttactaccggccgggcgtgaacctgtccctgtcgtgccacgctgcctccaatccgccggcccagtactcctggctcatcgacggaaacatccagcagcacacccaagaactgttcatctccaacattaccgagaaaaactcgggactttacacctgtcaagccaacaattccgccagcggccactcccgcaccactgtcaaaactatcactgtgtccgccgaactcccgaagcccagcatcagctccaacaactcgaagcccgtggaggataaggacgctgtcgcgttcacctgtgaaccagaggcacagaataccacctacctttggtgggtcaacggacagtccctgcctgtctcaccgagactgcagctgtcaaacgggaataggactctgaccttgtttaacgtcacccggaacgacgcccgggcctacgtgtgcggcatccagaactccgtgagcgcaaaccggtctgacccagtgaccctggatgtgctgtacggccccgacactccgatcatttcaccccccgattcatcctacctgtccggcgctaacctcaacctctcatgccactccgcatccaaccccagcccgcaatattcgtggcgcattaacggaattcctcagcaacatacccaggtcctgttcattgcgaagatcacccctaacaacaacggaacctacgcctgctttgtgtcaaacctggccactggtagaaacaactccatcgtgaagtccattaccgtgtcggcgtccggaacttccccgggcctgagcgccggcgccaccgtgggaattatgatcggcgtgctcgtgggagtggccctgatcggatccggcgagggcagaggcagcctgctgacatgtggcgacgtggaagagaaccctggccccacccctggaacccagagccccttcttccttctgctgctgctgaccgtgctgactgtcgtgacaggctctggccacgccagctctacacctggcggcgagaaagagacaagcgccacccagagaagcagcgtgccaagcagcaccgagaagaacgccgtgtccatgaccagctccgtgctgagcagccactctcctggcagcggcagcagcacaacacagggccaggatgtgacactggcccctgccacagaacctgcctctggatctgccgccacctggggacaggacgtgacaagcgtgccagtgaccagacctgccctgggctctacaacaccccctgcccacgatgtgaccagcgcccctgataacaagcctgcccctggaagcacagcccctccagctcatggcgtgacctctgccccagataccagaccagccccaggatctacagccccacccgcacacggcgtgacaagtgcccctgacacaagacccgctccaggctctactgctcctcctgcccatggcgtgacaagcgctcccgatacaaggccagctcctggctccacagcaccaccagcacatggcgtgacatcagctcccgacactagacctgctcccggatcaaccgctccaccagctcacggcgtgaccagcgcacctgataccagacctgctctgggaagcaccgcccctcccgtgcacaatgtgacatctgcttccggcagcgccagcggctctgcctctacactggtgcacaacggcaccagcgccagagccacaacaaccccagccagcaagagcacccccttcagcatccctagccaccacagcgacacccctaccacactggccagccactccaccaagaccgatgcctctagcacccaccactccagcgtgccccctctgaccagcagcaaccacagcacaagcccccagctgtctaccggcgtctcattcttctttctgtccttccacatcagcaacctgcagttcaacagcagcctggaagatcccagcaccgactactaccaggaactgcagcgggatatcagcgagatgttcctgcaaatctacaagcagggcggcttcctgggcctgagcaacatcaagttcagacccggcagcgtggtggtgcagctgaccctggctttccgggaaggcaccatcaacgtgcacgacgtggaaacccagttcaaccagtacaagaccgaggccgccagccggtacaacctgaccatctccgatgtgtccgtgtccgacgtgcccttcccattctctgcccagtctggcgcaggcgtgccaggatggggaattgctctgctggtgctcgtgtgcgtgctggtggccctggccatcgtgtatctgattgccctggccgtgtgccagtgccggcggaagaattacggccagctggacatcttccccgccagagacacctaccaccccatgagcgagtaccccacataccacacccacggcagatacgtgccacccagctccaccgacagatccccctacgagaaagtgtctgccggcaacggcggcagctccctgagctacacaaatcctgccgtggccgctgcctccgccaacctgggatccggcacaatcctgtctgagggcgccaccaacttcagcctgctgaaactggccggcgacgtggaactgaaccctggccctggagctgccccggagccggagaggacccccgttggccagggatcgtgggcccatccgggacgcaccaggggaccatccgacaggggattctgtgtggtgtcaccggccaggccagcagaagaggcaaccagcctcgagggagcgttgtctggaaccagacattcccacccgtcggtgggccggcagcaccacgcgggaccaccgtccacttccagaccgccacggccatgggacaccccttgcccgcctgtgtatgccgagactaaacacttcctgtactcatccggagacaaggaacagcttcggccgtccttcctcctgtcgtcgctcagaccgagcctgaccggagcacgcagattggtggaaactatcttccttgggtcacgtccgtggatgccaggtaccccacggcgcctcccgcgcctcccacagagatactggcagatgcggcctctgttcctggaattgctgggaaaccacgctcagtgcccgtacggagtcctgctcaagactcactgccctctgagggcggcggtcactccggcggccggagtgtgcgcacgggagaagccccagggaagcgtggcagctccggaagaggaggacaccgatccgcgccgcctcgtgcaacttctgcgccagcactcctcgccctggcaagtctacgggttcgtccgcgcctgcctgcgccgcctggtgccgcctgggctctggggttcccggcataacgagcgccgcttcctgagaaatactaagaagtttatctcacttggaaaacatgccaagttgtcgctgcaagaactcacgtggaagatgtcagtccgcgattgcgcctggctgcgccgctcgccgggcgtcgggtgtgttccagctgcagaacaccgcctgagagaagaaattctggccaaatttctgcattggctgatgtcagtgtacgtggtcgagctgctgcgctcctttttctacgtcactgagactacctttcaaaagaaccgcctgttcttctaccgcaaatctgtgtggagcaagctgcagtcaatcggcattcgccagcatctgaagagggtgcagctgcgggaactttccgaggcagaagtccgccagcaccgggaggcccggccggcgcttctcacgtcgcgtctgagattcatcccaaagcccgacgggctgaggcctatcgtcaacatggattacgtcgtgggcgctcgcacctttcgccgtgaaaagcgggccgaacgcttgacctcacgggtgaaggccctcttctccgtgctgaactacgagagagcaagacggcctggcctgctgggagcttcggtgctgggactggacgatatccaccgggcttggcggacctttgttctccgggtgagagcccaagaccctccgccggaactgtacttcgtgaaggtggcgatcaccggagcctatgatactattccgcaagatcgactcaccgaagtcatcgcctcgatcatcaaaccgcagaacacttactgcgtcaggcggtacgccgtggtccagaaggccgcgcatggccacgtgagaaaggcgttcaagtcgcacgtgtccactctcaccgacctccagccttacatgaggcaattcgttgcgcatttgcaagagacttcgcccctgagagatgcggtggtcatcgagcagagctccagcctgaacgaagcgagcagcggtctgtttgacgtgttcctccgcttcatgtgtcatcacgcggtgcgaatcaggggaaaatcatacgtgcagtgccagggaatcccacaaggcagcattctgtcgactctcttgtgttccctttgctacggcgatatggaaaacaagctgttcgctgggatcagacgggacgggttgctgctcagactggtggacgacttcctgctggtgactccgcacctcactcacgccaaaacctttctccgcactctggtgaggggagtgccagaatacggctgtgtggtcaatctccggaaaactgtggtgaatttccctgtcgaggatgaggcactcggaggaaccgcatttgtccaaatgccagcacatggcctgttcccatggtgcggtctgctgctggacacccgaactcttgaagtgcagtccgactactccagctatgcccggacgagcatccgcgccagcctcactttcaatcgcggctttaaggccggacgaaacatgcgcagaaagcttttcggagtcctccggcttaaatgccattcgctctttctcgatctccaagtcaattcgctgcagaccgtgtgcacgaacatctacaagatcctgctgctccaagcctaccggttccacgcttgcgtgcttcagctgccgtttcaccaacaggtgtggaagaacccgaccttctttctgcgggtcattagcgatactgcctccctgtgttactcaatcctcaaggcaaagaacgccggaatgtcgctgggtgcgaaaggagccgcgggacctcttcctagcgaagcggtgcagtggctctgccaccaggctttcctcctgaagctgaccaggcacagagtgacctacgtcccgctgctgggctcgctgcgcactgcacagacccagctgtctagaaaactccccggcaccaccctgaccgctctggaagccgccgccaacccagcattgccgtcagatttcaagaccatcttggac

SEQ ID NO: 45 - protein, 2001 aa, Artificial Sequence
  Synthetic Construct
MASESPSAPPHRWCIPWQRLLLTASLLTFWNPPTTAKLTIESTPFNVAEGKEVLLLVHNLPQHLFGYSWYKGERVDGNRQIIGYVIGTQQATPGPAYSGREIIYPNASLLIQNIIQNDTGFYTLHVIKSDLVNEEATGQFRVYPELPKPFITSNNSNPVEDEDAVALTCEPEIQNTTYLWWVNNQSLPVSPRLQLSNDNRTLTLLSVTRNDVGPYECGIQNKLSVDHSDPVILNVLYGPDDPTISPSYTYYRPGVNLSLSCHAASNPPAQYSWLIDGNIQQHTQELFISNITEKNSGLYTCQANNSASGHSRTTVKTITVSAELPKPSISSNNSKPVEDKDAVAFTCEPEAQNTTYLWWVNGQSLPVSPRLQLSNGNRTLTLFNVTRNDARAYVCGIQNSVSANRSDPVTLDVLYGPDTPIISPPDSSYLSGANLNLSCHSASNPSPQYSWRINGIPQQHTQVLFIAKITPNNNGTYACFVSNLATGRNNSIVKSITVSASGTSPGLSAGATVGIMIGVLVGVALIGSGEGRGSLLTCGDVEENPGPTPGTQSPFFLLLLLTVLTVVTGSGHASSTPGGEKETSATQRSSVPSSTEKNAVSMTSSVLSSHSPGSGSSTTQGQDVTLAPATEPASGSAATWGQDVTSVPVTRPALGSTTPPAHDVTSAPDNKPAPGSTAPPAHGVTSAPDTRPAPGSTAPPAHGVTSAPDTRPAPGSTAPPAHGVTSAPDTRPAPGSTAPPAHGVTSAPDTRPAPGSTAPPAHGVTSAPDTRPALGSTAPPVHNVTSASGSASGSASTLVHNGTSARATTTPASKSTPFSIPSHHSDTPTTLASHSTKTDASSTHHSSVPPLTSSNHSTSPQLSTGVSFFFLSFHISNLQFNSSLEDPSTDYYQELQRDISEMFLQIYKQGGFLGLSNIKFRPGSVVVQLTLAFREGTINVHDVETQFNQYKTEAASRYNLTISDVSVSDVPFPFSAQSGAGVPGWGIALLVLVCVLVALAIVYLIALAVCQCRRKNYGQLDIFPARDTYHPMSEYPTYHTHGRYVPPSSTDRSPYEKVSAGNGGSSLSYTNPAVAAASANLGSGTILSEGATNFSLLKLAGDVELNPGPGAAPEPERTPVGQGSWAHPGRTRGPSDRGFCVVSPARPAEEATSLEGALSGTRHSHPSVGRQHHAGPPSTSRPPRPWDTPCPPVYAETKHFLYSSGDKEQLRPSFLLSSLRPSLTGARRLVETIFLGSRPWMPGTPRRLPRLPQRYWQMRPLFLELLGNHAQCPYGVLLKTHCPLRAAVTPAAGVCAREKPQGSVAAPEEEDTDPRRLVQLLRQHSSPWQVYGFVRACLRRLVPPGLWGSRHNERRFLRNTKKFISLGKHAKLSLQELTWKMSVRDCAWLRRSPGVGCVPAAEHRLREEILAKFLHWLMSVYVVELLRSFFYVTETTFQKNRLFFYRKSVWSKLQSIGIRQHLKRVQLRELSEAEVRQHREARPALLTSRLRFIPKPDGLRPIVNMDYVVGARTFRREKRAERLTSRVKALFSVLNYERARRPGLLGASVLGLDDIHRAWRTFVLRVRAQDPPPELYFVKVAITGAYDTIPQDRLTEVIASIIKPQNTYCVRRYAVVQKAAHGHVRKAFKSHVSTLTDLQPYMRQFVAHLQETSPLRDAVVIEQSSSLNEASSGLFDVFLRFMCHHAVRIRGKSYVQCQGIPQGSILSTLLCSLCYGDMENKLFAGIRRDGLLLRLVDDFLLVTPHLTHAKTFLRTLVRGVPEYGCVVNLRKTVVNFPVEDEALGGTAFVQMPAHGLFPWCGLLLDTRTLEVQSDYSSYARTSIRASLTFNRGFKAGRNMRRKLFGVLRLKCHSLFLDLQVNSLQTVCTNIYKILLLQAYRFHACVLQLPFHQQVWKNPTFFLRVISDTASLCYSILKAKNAGMSLGAKGAAGPLPSEAVQWLCHQAFLLKLTRHRVTYVPLLGSLRTAQTQLSRKLPGTTLTALEAAANPALPSDFKTILD

SEQ ID NO: 46 - DNA, 6024 bp, Artificial Sequence
  Synthetic Construct
atggctagcggagctgccccggagccggagaggacccccgttggccagggatcgtgggcccatccgggacgcaccaggggaccatccgacaggggattctgtgtggtgtcaccggccaggccagcagaagaggcaaccagcctcgagggagcgttgtctggaaccagacattcccacccgtcggtgggccggcagcaccacgcgggaccaccgtccacttccagaccgccacggccatgggacaccccttgcccgcctgtgtatgccgagactaaacacttcctgtactcatccggagacaaggaacagcttcggccgtccttcctcctgtcgtcgctcagaccgagcctgaccggagcacgcagattggtggaaactatcttccttgggtcacgtccgtggatgccaggtaccccacggcgcctcccgcgcctcccacagagatactggcagatgcggcctctgttcctggaattgctgggaaaccacgctcagtgcccgtacggagtcctgctcaagactcactgccctctgagggcggcggtcactccggcggccggagtgtgcgcacgggagaagccccagggaagcgtggcagctccggaagaggaggacaccgatccgcgccgcctcgtgcaacttctgcgccagcactcctcgccctggcaagtctacgggttcgtccgcgcctgcctgcgccgcctggtgccgcctgggctctggggttcccggcataacgagcgccgcttcctgagaaatactaagaagtttatctcacttggaaaacatgccaagttgtcgctgcaagaactcacgtggaagatgtcagtccgcgattgcgcctggctgcgccgctcgccgggcgtcgggtgtgttccagctgcagaacaccgcctgagagaagaaattctggccaaatttctgcattggctgatgtcagtgtacgtggtcgagctgctgcgctcctttttctacgtcactgagactacctttcaaaagaaccgcctgttcttctaccgcaaatctgtgtggagcaagctgcagtcaatcggcattcgccagcatctgaagagggtgcagctgcgggaactttccgaggcagaagtccgccagcaccgggaggcccggccggcgcttctcacgtcgcgtctgagattcatcccaaagcccgacgggctgaggcctatcgtcaacatggattacgtcgtgggcgctcgcacctttcgccgtgaaaagcgggccgaacgcttgacctcacgggtgaaggccctcttctccgtgctgaactacgagagagcaagacggcctggcctgctgggagcttcggtgctgggactggacgatatccaccgggcttggcggacctttgttctccgggtgagagcccaagaccctccgccggaactgtacttcgtgaaggtggcgatcaccggagcctatgatactattccgcaagatcgactcaccgaagtcatcgcctcgatcatcaaaccgcagaacacttactgcgtcaggcggtacgccgtggtccagaaggccgcgcatggccacgtgagaaaggcgttcaagtcgcacgtgtccactctcaccgacctccagccttacatgaggcaattcgttgcgcatttgcaagagacttcgcccctgagagatgcggtggtcatcgagcagagctccagcctgaacgaagcgagcagcggtctgtttgacgtgttcctccgcttcatgtgtcatcacgcggtgcgaatcaggggaaaatcatacgtgcagtgccagggaatcccacaaggcagcattctgtcgactctcttgtgttccctttgctacggcgatatggaaaacaagctgttcgctgggatcagacgggacgggttgctgctcagactggtggacgacttcctgctggtgactccgcacctcactcacgccaaaacctttctccgcactctggtgaggggagtgccagaatacggctgtgtggtcaatctccggaaaactgtggtgaatttccctgtcgaggatgaggcactcggaggaaccgcatttgtccaaatgccagcacatggcctgttcccatggtgcggtctgctgctggacacccgaactcttgaagtgcagtccgactactccagctatgcccggacgagcatccgcgccagcctcactttcaatcgcggctttaaggccggacgaaacatgcgcagaaagcttttcggagtcctccggcttaaatgccattcgctctttctcgatctccaagtcaattcgctgcagaccgtgtgcacgaacatctacaagatcctgctgctccaagcctaccggttccacgcttgcgtgcttcagctgccgtttcaccaacaggtgtggaagaacccgaccttctttctgcgggtcattagcgatactgcctccctgtgttactcaatcctcaaggcaaagaacgccggaatgtcgctgggtgcgaaaggagccgcgggacctcttcctagcgaagcggtgcagtggctctgccaccaggctttcctcctgaagctgaccaggcacagagtgacctacgtcccgctgctgggctcgctgcgcactgcacagacccagctgtctagaaaactccccggcaccaccctgaccgctctggaagccgccgccaacccagcattgccgtcagatttcaagaccatcttggacggatccggcacaatcctgtctgagggcgccaccaacttcagcctgctgaaactggccggcgacgtggaactgaaccctggccctacccctggaacccagagccccttcttccttctgctgctgctgaccgtgctgactgtcgtgacaggctctggccacgccagctctacacctggcggcgagaaagagacaagcgccacccagagaagcagcgtgccaagcagcaccgagaagaacgccgtgtccatgaccagctccgtgctgagcagccactctcctggcagcggcagcagcacaacacagggccaggatgtgacactggcccctgccacagaacctgcctctggatctgccgccacctggggacaggacgtgacaagcgtgccagtgaccagacctgccctgggctctacaacaccccctgcccacgatgtgaccagcgcccctgataacaagcctgcccctggaagcacagcccctccagctcatggcgtgacctctgccccagataccagaccagccccaggatctacagccccacccgcacacggcgtgacaagtgcccctgacacaagacccgctccaggctctactgctcctcctgcccatggcgtgacaagcgctcccgatacaaggccagctcctggctccacagcaccaccagcacatggcgtgacatcagctcccgacactagacctgctcccggatcaaccgctccaccagctcacggcgtgaccagcgcacctgataccagacctgctctgggaagcaccgcccctcccgtgcacaatgtgacatctgcttccggcagcgccagcggctctgcctctacactggtgcacaacggcaccagcgccagagccacaacaaccccagccagcaagagcacccccttcagcatccctagccaccacagcgacacccctaccacactggccagccactccaccaagaccgatgcctctagcacccaccactccagcgtgccccctctgaccagcagcaaccacagcacaagcccccagctgtctaccggcgtctcattcttctttctgtccttccacatcagcaacctgcagttcaacagcagcctggaagatcccagcaccgactactaccaggaactgcagcgggatatcagcgagatgttcctgcaaatctacaagcagggcggcttcctgggcctgagcaacatcaagttcagacccggcagcgtggtggtgcagctgaccctggctttccgggaaggcaccatcaacgtgcacgacgtggaaacccagttcaaccagtacaagaccgaggccgccagccggtacaacctgaccatctccgatgtgtccgtgtccgacgtgcccttcccattctctgcccagtctggcgcaggcgtgccaggatggggaattgctctgctggtgctcgtgtgcgtgctggtggccctggccatcgtgtatctgattgccctggccgtgtgccagtgccggcggaagaattacggccagctggacatcttccccgccagagacacctaccaccccatgagcgagtaccccacataccacacccacggcagatacgtgccacccagctccaccgacagatccccctacgagaaagtgtctgccggcaacggcggcagctccctgagctacacaaatcctgccgtggccgctgcctccgccaacctgggatccggcagaatcttcaacgcccactacgccggctacttcgccgacctgctgatccacgacatcgagacaaaccctggccccgaatcgccaagcgcaccccctcatcggtggtgcatcccttggcaacgcctcctcctgaccgcctcactgctgactttctggaacccgccgaccaccgcaaagctgaccattgagagcactcccttcaacgtggctgaggggaaggaggtgctgctcctggtgcacaatctgccccagcacctgttcgggtactcctggtacaagggagaacgcgtggacgggaaccggcagatcataggctacgtcatcggaacccagcaggccacacccggtccagcgtacagcggccgggagattatctacccgaacgcctccctgctgatccaaaacatcatccagaacgacaccggtttctacactctgcacgtgattaagtcagatctggtcaacgaagaggccaccggccaattcagggtgtaccccgaactccctaagccgttcatcacctcgaacaacagcaacccggtcgaggatgaagatgcggtggccttgacgtgcgaacctgagatccagaacaccacctacttgtggtgggtgaacaatcagagcctgccagtctccccacgactccagctgtcgaacgacaacaggaccctgactttgctgtccgtgactcggaacgacgtgggcccttatgaatgcggtatccagaacaagctgtccgtggaccacagcgaccctgtgatcctgaacgtcctttacgggccggacgaccccaccatttccccgtcgtacacttactaccggccgggcgtgaacctgtccctgtcgtgccacgctgcctccaatccgccggcccagtactcctggctcatcgacggaaacatccagcagcacacccaagaactgttcatctccaacattaccgagaaaaactcgggactttacacctgtcaagccaacaattccgccagcggccactcccgcaccactgtcaaaactatcactgtgtccgccgaactcccgaagcccagcatcagctccaacaactcgaagcccgtggaggataaggacgctgtcgcgttcacctgtgaaccagaggcacagaataccacctacctttggtgggtcaacggacagtccctgcctgtctcaccgagactgcagctgtcaaacgggaataggactctgaccttgtttaacgtcacccggaacgacgcccgggcctacgtgtgcggcatccagaactccgtgagcgcaaaccggtctgacccagtgaccctggatgtgctgtacggccccgacactccgatcatttcaccccccgattcatcctacctgtccggcgctaacctcaacctctcatgccactccgcatccaaccccagcccgcaatattcgtggcgcattaacggaattcctcagcaacatacccaggtcctgttcattgcgaagatcacccctaacaacaacggaacctacgcctgctttgtgtcaaacctggccactggtagaaacaactccatcgtgaagtccattaccgtgtcggcgtccggaacttccccgggcctgagcgccggcgccaccgtgggaattatgatcggcgtgctcgtgggagtggccctgatc

SEQ ID NO: 47 - protein, 2008 aa, Artificial Sequence
  Synthetic Construct
MASGAAPEPERTPVGQGSWAHPGRTRGPSDRGFCVVSPARPAEEATSLEGALSGTRHSHPSVGRQHHAGPPSTSRPPRPWDTPCPPVYAETKHFLYSSGDKEQLRPSFLLSSLRPSLTGARRLVETIFLGSRPWMPGTPRRLPRLPQRYWQMRPLFLELLGNHAQCPYGVLLKTHCPLRAAVTPAAGVCAREKPQGSVAAPEEEDTDPRRLVQLLRQHSSPWQVYGFVRACLRRLVPPGLWGSRHNERRFLRNTKKFISLGKHAKLSLQELTWKMSVRDCAWLRRSPGVGCVPAAEHRLREEILAKFLHWLMSVYVVELLRSFFYVTETTFQKNRLFFYRKSVWSKLQSIGIRQHLKRVQLRELSEAEVRQHREARPALLTSRLRFIPKPDGLRPIVNMDYVVGARTFRREKRAERLTSRVKALFSVLNYERARRPGLLGASVLGLDDIHRAWRTFVLRVRAQDPPPELYFVKVAITGAYDTIPQDRLTEVIASIIKPQNTYCVRRYAVVQKAAHGHVRKAFKSHVSTLTDLQPYMRQFVAHLQETSPLRDAVVIEQSSSLNEASSGLFDVFLRFMCHHAVRIRGKSYVQCQGIPQGSILSTLLCSLCYGDMENKLFAGIRRDGLLLRLVDDFLLVTPHLTHAKTFLRTLVRGVPEYGCVVNLRKTVVNFPVEDEALGGTAFVQMPAHGLFPWCGLLLDTRTLEVQSDYSSYARTSIRASLTFNRGFKAGRNMRRKLFGVLRLKCHSLFLDLQVNSLQTVCTNIYKILLLQAYRFHACVLQLPFHQQVWKNPTFFLRVISDTASLCYSILKAKNAGMSLGAKGAAGPLPSEAVQWLCHQAFLLKLTRHRVTYVPLLGSLRTAQTQLSRKLPGTTLTALEAAANPALPSDFKTILDGSGTILSEGATNFSLLKLAGDVELNPGPTPGTQSPFFLLLLLTVLTVVTGSGHASSTPGGEKETSATQRSSVPSSTEKNAVSMTSSVLSSHSPGSGSSTTQGQDVTLAPATEPASGSAATWGQDVTSVPVTRPALGSTTPPAHDVTSAPDNKPAPGSTAPPAHGVTSAPDTRPAPGSTAPPAHGVTSAPDTRPAPGSTAPPAHGVTSAPDTRPAPGSTAPPAHGVTSAPDTRPAPGSTAPPAHGVTSAPDTRPALGSTAPPVHNVTSASGSASGSASTLVHNGTSARATTTPASKSTPFSIPSHHSDTPTTLASHSTKTDASSTHHSSVPPLTSSNHSTSPQLSTGVSFFFLSFHISNLQFNSSLEDPSTDYYQELQRDISEMFLQIYKQGGFLGLSNIKFRPGSVVVQLTLAFREGTINVHDVETQFNQYKTEAASRYNLTISDVSVSDVPFPFSAQSGAGVPGWGIALLVLVCVLVALAIVYLIALAVCQCRRKNYGQLDIFPARDTYHPMSEYPTYHTHGRYVPPSSTDRSPYEKVSAGNGGSSLSYTNPAVAAASANLGSGRIFNAHYAGYFADLLIHDIETNPGPESPSAPPHRWCIPWQRLLLTASLLTFWNPPTTAKLTIESTPFNVAEGKEVLLLVHNLPQHLFGYSWYKGERVDGNRQIIGYVIGTQQATPGPAYSGREIIYPNASLLIQNIIQNDTGFYTLHVIKSDLVNEEATGQFRVYPELPKPFITSNNSNPVEDEDAVALTCEPEIQNTTYLWWVNNQSLPVSPRLQLSNDNRTLTLLSVTRNDVGPYECGIQNKLSVDHSDPVILNVLYGPDDPTISPSYTYYRPGVNLSLSCHAASNPPAQYSWLIDGNIQQHTQELFISNITEKNSGLYTCQANNSASGHSRTTVKTITVSAELPKPSISSNNSKPVEDKDAVAFTCEPEAQNTTYLWWVNGQSLPVSPRLQLSNGNRTLTLFNVTRNDARAYVCGIQNSVSANRSDPVTLDVLYGPDTPIISPPDSSYLSGANLNLSCHSASNPSPQYSWRINGIPQQHTQVLFIAKITPNNNGTYACFVSNLATGRNNSIVKSITVSASGTSPGLSAGATVGIMIGVLVGVALI

SEQ ID NO: 48 - DNA, 5988 bp, Artificial Sequence
  Synthetic Construct
atggctagcggagctgccccggagccggagaggacccccgttggccagggatcgtgggcccatccgggacgcaccaggggaccatccgacaggggattctgtgtggtgtcaccggccaggccagcagaagaggcaaccagcctcgagggagcgttgtctggaaccagacattcccacccgtcggtgggccggcagcaccacgcgggaccaccgtccacttccagaccgccacggccatgggacaccccttgcccgcctgtgtatgccgagactaaacacttcctgtactcatccggagacaaggaacagcttcggccgtccttcctcctgtcgtcgctcagaccgagcctgaccggagcacgcagattggtggaaactatcttccttgggtcacgtccgtggatgccaggtaccccacggcgcctcccgcgcctcccacagagatactggcagatgcggcctctgttcctggaattgctgggaaaccacgctcagtgcccgtacggagtcctgctcaagactcactgccctctgagggcggcggtcactccggcggccggagtgtgcgcacgggagaagccccagggaagcgtggcagctccggaagaggaggacaccgatccgcgccgcctcgtgcaacttctgcgccagcactcctcgccctggcaagtctacgggttcgtccgcgcctgcctgcgccgcctggtgccgcctgggctctggggttcccggcataacgagcgccgcttcctgagaaatactaagaagtttatctcacttggaaaacatgccaagttgtcgctgcaagaactcacgtggaagatgtcagtccgcgattgcgcctggctgcgccgctcgccgggcgtcgggtgtgttccagctgcagaacaccgcctgagagaagaaattctggccaaatttctgcattggctgatgtcagtgtacgtggtcgagctgctgcgctcctttttctacgtcactgagactacctttcaaaagaaccgcctgttcttctaccgcaaatctgtgtggagcaagctgcagtcaatcggcattcgccagcatctgaagagggtgcagctgcgggaactttccgaggcagaagtccgccagcaccgggaggcccggccggcgcttctcacgtcgcgtctgagattcatcccaaagcccgacgggctgaggcctatcgtcaacatggattacgtcgtgggcgctcgcacctttcgccgtgaaaagcgggccgaacgcttgacctcacgggtgaaggccctcttctccgtgctgaactacgagagagcaagacggcctggcctgctgggagcttcggtgctgggactggacgatatccaccgggcttggcggacctttgttctccgggtgagagcccaagaccctccgccggaactgtacttcgtgaaggtggcgatcaccggagcctatgatactattccgcaagatcgactcaccgaagtcatcgcctcgatcatcaaaccgcagaacacttactgcgtcaggcggtacgccgtggtccagaaggccgcgcatggccacgtgagaaaggcgttcaagtcgcacgtgtccactctcaccgacctccagccttacatgaggcaattcgttgcgcatttgcaagagacttcgcccctgagagatgcggtggtcatcgagcagagctccagcctgaacgaagcgagcagcggtctgtttgacgtgttcctccgcttcatgtgtcatcacgcggtgcgaatcaggggaaaatcatacgtgcagtgccagggaatcccacaaggcagcattctgtcgactctcttgtgttccctttgctacggcgatatggaaaacaagctgttcgctgggatcagacgggacgggttgctgctcagactggtggacgacttcctgctggtgactccgcacctcactcacgccaaaacctttctccgcactctggtgaggggagtgccagaatacggctgtgtggtcaatctccggaaaactgtggtgaatttccctgtcgaggatgaggcactcggaggaaccgcatttgtccaaatgccagcacatggcctgttcccatggtgcggtctgctgctggacacccgaactcttgaagtgcagtccgactactccagctatgcccggacgagcatccgcgccagcctcactttcaatcgcggctttaaggccggacgaaacatgcgcagaaagcttttcggagtcctccggcttaaatgccattcgctctttctcgatctccaagtcaattcgctgcagaccgtgtgcacgaacatctacaagatcctgctgctccaagcctaccggttccacgcttgcgtgcttcagctgccgtttcaccaacaggtgtggaagaacccgaccttctttctgcgggtcattagcgatactgcctccctgtgttactcaatcctcaaggcaaagaacgccggaatgtcgctgggtgcgaaaggagccgcgggacctcttcctagcgaagcggtgcagtggctctgccaccaggctttcctcctgaagctgaccaggcacagagtgacctacgtcccgctgctgggctcgctgcgcactgcacagacccagctgtctagaaaactccccggcaccaccctgaccgctctggaagccgccgccaacccagcattgccgtcagatttcaagaccatcttggacggatccggccagtgcaccaattacgccctgctgaagctggccggcgacgtggaatctaaccctggccctgaatcgccaagcgcaccccctcatcggtggtgcatcccttggcaacgcctcctcctgaccgcctcactgctgactttctggaacccgccgaccaccgcaaagctgaccattgagagcactcccttcaacgtggctgaggggaaggaggtgctgctcctggtgcacaatctgccccagcacctgttcgggtactcctggtacaagggagaacgcgtggacgggaaccggcagatcataggctacgtcatcggaacccagcaggccacacccggtccagcgtacagcggccgggagattatctacccgaacgcctccctgctgatccaaaacatcatccagaacgacaccggtttctacactctgcacgtgattaagtcagatctggtcaacgaagaggccaccggccaattcagggtgtaccccgaactccctaagccgttcatcacctcgaacaacagcaacccggtcgaggatgaagatgcggtggccttgacgtgcgaacctgagatccagaacaccacctacttgtggtgggtgaacaatcagagcctgccagtctccccacgactccagctgtcgaacgacaacaggaccctgactttgctgtccgtgactcggaacgacgtgggcccttatgaatgcggtatccagaacaagctgtccgtggaccacagcgaccctgtgatcctgaacgtcctttacgggccggacgaccccaccatttccccgtcgtacacttactaccggccgggcgtgaacctgtccctgtcgtgccacgctgcctccaatccgccggcccagtactcctggctcatcgacggaaacatccagcagcacacccaagaactgttcatctccaacattaccgagaaaaactcgggactttacacctgtcaagccaacaattccgccagcggccactcccgcaccactgtcaaaactatcactgtgtccgccgaactcccgaagcccagcatcagctccaacaactcgaagcccgtggaggataaggacgctgtcgcgttcacctgtgaaccagaggcacagaataccacctacctttggtgggtcaacggacagtccctgcctgtctcaccgagactgcagctgtcaaacgggaataggactctgaccttgtttaacgtcacccggaacgacgcccgggcctacgtgtgcggcatccagaactccgtgagcgcaaaccggtctgacccagtgaccctggatgtgctgtacggccccgacactccgatcatttcaccccccgattcatcctacctgtccggcgctaacctcaacctctcatgccactccgcatccaaccccagcccgcaatattcgtggcgcattaacggaattcctcagcaacatacccaggtcctgttcattgcgaagatcacccctaacaacaacggaacctacgcctgctttgtgtcaaacctggccactggtagaaacaactccatcgtgaagtccattaccgtgtcggcgtccggaacttccccgggcctgagcgccggcgccaccgtgggaattatgatcggcgtgctcgtgggagtggccctgatcggatccggcgagggcagaggcagcctgctgacatgtggcgacgtggaagagaaccctggccccacccctggaacccagagccccttcttccttctgctgctgctgaccgtgctgactgtcgtgacaggctctggccacgccagctctacacctggcggcgagaaagagacaagcgccacccagagaagcagcgtgccaagcagcaccgagaagaacgccgtgtccatgaccagctccgtgctgagcagccactctcctggcagcggcagcagcacaacacagggccaggatgtgacactggcccctgccacagaacctgcctctggatctgccgccacctggggacaggacgtgacaagcgtgccagtgaccagacctgccctgggctctacaacaccccctgcccacgatgtgaccagcgcccctgataacaagcctgcccctggaagcacagcccctccagctcatggcgtgacctctgccccagataccagaccagccccaggatctacagccccacccgcacacggcgtgacaagtgcccctgacacaagacccgctccaggctctactgctcctcctgcccatggcgtgacaagcgctcccgatacaaggccagctcctggctccacagcaccaccagcacatggcgtgacatcagctcccgacactagacctgctcccggatcaaccgctccaccagctcacggcgtgaccagcgcacctgataccagacctgctctgggaagcaccgcccctcccgtgcacaatgtgacatctgcttccggcagcgccagcggctctgcctctacactggtgcacaacggcaccagcgccagagccacaacaaccccagccagcaagagcacccccttcagcatccctagccaccacagcgacacccctaccacactggccagccactccaccaagaccgatgcctctagcacccaccactccagcgtgccccctctgaccagcagcaaccacagcacaagcccccagctgtctaccggcgtctcattcttctttctgtccttccacatcagcaacctgcagttcaacagcagcctggaagatcccagcaccgactactaccaggaactgcagcgggatatcagcgagatgttcctgcaaatctacaagcagggcggcttcctgggcctgagcaacatcaagttcagacccggcagcgtggtggtgcagctgaccctggctttccgggaaggcaccatcaacgtgcacgacgtggaaacccagttcaaccagtacaagaccgaggccgccagccggtacaacctgaccatctccgatgtgtccgtgtccgacgtgcccttcccattctctgcccagtctggcgcaggcgtgccaggatggggaattgctctgctggtgctcgtgtgcgtgctggtggccctggccatcgtgtatctgattgccctggccgtgtgccagtgccggcggaagaattacggccagctggacatcttccccgccagagacacctaccaccccatgagcgagtaccccacataccacacccacggcagatacgtgccacccagctccaccgacagatccccctacgagaaagtgtctgccggcaacggcggcagctccctgagctacacaaatcctgccgtggccgctgcctccgccaacctg

SEQ ID NO: 49 - protein, 1996 aa, Artificial Sequence
  Synthetic Construct
MASGAAPEPERTPVGQGSWAHPGRTRGPSDRGFCVVSPARPAEEATSLEGALSGTRHSHPSVGRQHHAGPPSTSRPPRPWDTPCPPVYAETKHFLYSSGDKEQLRPSFLLSSLRPSLTGARRLVETIFLGSRPWMPGTPRRLPRLPQRYWQMRPLFLELLGNHAQCPYGVLLKTHCPLRAAVTPAAGVCAREKPQGSVAAPEEEDTDPRRLVQLLRQHSSPWQVYGFVRACLRRLVPPGLWGSRHNERRFLRNTKKFISLGKHAKLSLQELTWKMSVRDCAWLRRSPGVGCVPAAEHRLREEILAKFLHWLMSVYVVELLRSFFYVTETTFQKNRLFFYRKSVWSKLQSIGIRQHLKRVQLRELSEAEVRQHREARPALLTSRLRFIPKPDGLRPIVNMDYVVGARTFRREKRAERLTSRVKALFSVLNYERARRPGLLGASVLGLDDIHRAWRTFVLRVRAQDPPPELYFVKVAITGAYDTIPQDRLTEVIASIIKPQNTYCVRRYAVVQKAAHGHVRKAFKSHVSTLTDLQPYMRQFVAHLQETSPLRDAVVIEQSSSLNEASSGLFDVFLRFMCHHAVRIRGKSYVQCQGIPQGSILSTLLCSLCYGDMENKLFAGIRRDGLLLRLVDDFLLVTPHLTHAKTFLRTLVRGVPEYGCVVNLRKTVVNFPVEDEALGGTAFVQMPAHGLFPWCGLLLDTRTLEVQSDYSSYARTSIRASLTFNRGFKAGRNMRRKLFGVLRLKCHSLFLDLQVNSLQTVCTNIYKILLLQAYRFHACVLQLPFHQQVWKNPTFFLRVISDTASLCYSILKAKNAGMSLGAKGAAGPLPSEAVQWLCHQAFLLKLTRHRVTYVPLLGSLRTAQTQLSRKLPGTTLTALEAAANPALPSDFKTILDGSGQCTNYALLKLAGDVESNPGPESPSAPPHRWCIPWQRLLLTASLLTFWNPPTTAKLTIESTPFNVAEGKEVLLLVHNLPQHLFGYSWYKGERVDGNRQIIGYVIGTQQATPGPAYSGREIIYPNASLLIQNIIQNDTGFYTLHVIKSDLVNEEATGQFRVYPELPKPFITSNNSNPVEDEDAVALTCEPEIQNTTYLWWVNNQSLPVSPRLQLSNDNRTLTLLSVTRNDVGPYECGIQNKLSVDHSDPVILNVLYGPDDPTISPSYTYYRPGVNLSLSCHAASNPPAQYSWLIDGNIQQHTQELFISNITEKNSGLYTCQANNSASGHSRTTVKTITVSAELPKPSISSNNSKPVEDKDAVAFTCEPEAQNTTYLWWVNGQSLPVSPRLQLSNGNRTLTLFNVTRNDARAYVCGIQNSVSANRSDPVTLDVLYGPDTPIISPPDSSYLSGANLNLSCHSASNPSPQYSWRINGIPQQHTQVLFIAKITPNNNGTYACFVSNLATGRNNSIVKSITVSASGTSPGLSAGATVGIMIGVLVGVALIGSGEGRGSLLTCGDVEENPGPTPGTQSPFFLLLLLTVLTVVTGSGHASSTPGGEKETSATQRSSVPSSTEKNAVSMTSSVLSSHSPGSGSSTTQGQDVTLAPATEPASGSAATWGQDVTSVPVTRPALGSTTPPAHDVTSAPDNKPAPGSTAPPAHGVTSAPDTRPAPGSTAPPAHGVTSAPDTRPAPGSTAPPAHGVTSAPDTRPAPGSTAPPAHGVTSAPDTRPAPGSTAPPAHGVTSAPDTRPALGSTAPPVHNVTSASGSASGSASTLVHNGTSARATTTPASKSTPFSIPSHHSDTPTTLASHSTKTDASSTHHSSVPPLTSSNHSTSPQLSTGVSFFFLSFHISNLQFNSSLEDPSTDYYQELQRDISEMFLQIYKQGGFLGLSNIKFRPGSVVVQLTLAFREGTINVHDVETQFNQYKTEAASRYNLTISDVSVSDVPFPFSAQSGAGVPGWGIALLVLVCVLVALAIVYLIALAVCQCRRKNYGQLDIFPARDTYHPMSEYPTYHTHGRYVPPSSTDRSPYEKVSAGNGGSSLSYTNPAVAAASANL

SEQ ID NO: 50 - DNA, 5829 bp, Artificial Sequence
  Synthetic Construct
atggctagcacccctggaacccagagccccttcttccttctgctgctgctgaccgtgctgactgtcgtgacaggctctggccacgccagctctacacctggcggcgagaaagagacaagcgccacccagagaagcagcgtgccaagcagcaccgagaagaacgccgtgtccatgaccagctccgtgctgagcagccactctcctggcagcggcagcagcacaacacagggccaggatgtgacactggcccctgccacagaacctgcctctggatctgccgccacctggggacaggacgtgacaagcgtgccagtgaccagacctgccctgggctctacaacaccccctgcccacgatgtgaccagcgcccctgataacaagcctgcccctggaagcacagcccctccagctcatggcgtgacctctgccccagataccagaccagccccaggatctacagccccacccgcacacggcgtgacaagtgcccctgacacaagacccgctccaggctctactgctcctcctgcccatggcgtgacaagcgctcccgatacaaggccagctcctggctccacagcaccaccagcacatggcgtgacatcagctcccgacactagacctgctcccggatcaaccgctccaccagctcacggcgtgaccagcgcacctgataccagacctgctctgggaagcaccgcccctcccgtgcacaatgtgacatctgcttccggcagcgccagcggctctgcctctacactggtgcacaacggcaccagcgccagagccacaacaaccccagccagcaagagcacccccttcagcatccctagccaccacagcgacacccctaccacactggccagccactccaccaagaccgatgcctctagcacccaccactccagcgtgccccctctgaccagcagcaaccacagcacaagcccccagctgtctaccggcgtctcattcttctttctgtccttccacatcagcaacctgcagttcaacagcagcctggaagatcccagcaccgactactaccaggaactgcagcgggatatcagcgagatgttcctgcaaatctacaagcagggcggcttcctgggcctgagcaacatcaagttcagacccggcagcgtggtggtgcagctgaccctggctttccgggaaggcaccatcaacgtgcacgacgtggaaacccagttcaaccagtacaagaccgaggccgccagccggtacaacctgaccatctccgatgtgtccgtgtccgacgtgcccttcccattctctgcccagtctggcgcaggcgtgccaggatggggaattgctctgctggtgctcgtgtgcgtgctggtggccctggccatcgtgtatctgattgccctggccgtgtgccagtgccggcggaagaattacggccagctggacatcttccccgccagagacacctaccaccccatgagcgagtaccccacataccacacccacggcagatacgtgccacccagctccaccgacagatccccctacgagaaagtgtctgccggcaacggcggcagctccctgagctacacaaatcctgccgtggccgctgcctccgccaacctgggatccggcagaatcttcaacgcccactacgccggctacttcgccgacctgctgatccacgacatcgagacaaaccctggccccaagctgaccattgagagcactcccttcaacgtggctgaggggaaggaggtgctgctcctggtgcacaatctgccccagcacctgttcgggtactcctggtacaagggagaacgcgtggacgggaaccggcagatcataggctacgtcatcggaacccagcaggccacacccggtccagcgtacagcggccgggagattatctacccgaacgcctccctgctgatccaaaacatcatccagaacgacaccggtttctacactctgcacgtgattaagtcagatctggtcaacgaagaggccaccggccaattcagggtgtaccccgaactccctaagccgttcatcacctcgaacaacagcaacccggtcgaggatgaagatgcggtggccttgacgtgcgaacctgagatccagaacaccacctacttgtggtgggtgaacaatcagagcctgccagtctccccacgactccagctgtcgaacgacaacaggaccctgactttgctgtccgtgactcggaacgacgtgggcccttatgaatgcggtatccagaacaagctgtccgtggaccacagcgaccctgtgatcctgaacgtcctttacgggccggacgaccccaccatttccccgtcgtacacttactaccggccgggcgtgaacctgtccctgtcgtgccacgctgcctccaatccgccggcccagtactcctggctcatcgacggaaacatccagcagcacacccaagaactgttcatctccaacattaccgagaaaaactcgggactttacacctgtcaagccaacaattccgccagcggccactcccgcaccactgtcaaaactatcactgtgtccgccgaactcccgaagcccagcatcagctccaacaactcgaagcccgtggaggataaggacgctgtcgcgttcacctgtgaaccagaggcacagaataccacctacctttggtgggtcaacggacagtccctgcctgtctcaccgagactgcagctgtcaaacgggaataggactctgaccttgtttaacgtcacccggaacgacgcccgggcctacgtgtgcggcatccagaactccgtgagcgcaaaccggtctgacccagtgaccctggatgtgctgtacggccccgacactccgatcatttcaccccccgattcatcctacctgtccggcgctaacctcaacctctcatgccactccgcatccaaccccagcccgcaatattcgtggcgcattaacggaattcctcagcaacatacccaggtcctgttcattgcgaagatcacccctaacaacaacggaacctacgcctgctttgtgtcaaacctggccactggtagaaacaactccatcgtgaagtccattaccgtgtcggcgtccggatccggcgagggcagaggcagcctgctgacatgtggcgacgtggaagagaaccctggccccggagctgccccggagccggagaggacccccgttggccagggatcgtgggcccatccgggacgcaccaggggaccatccgacaggggattctgtgtggtgtcaccggccaggccagcagaagaggcaaccagcctcgagggagcgttgtctggaaccagacattcccacccgtcggtgggccggcagcaccacgcgggaccaccgtccacttccagaccgccacggccatgggacaccccttgcccgcctgtgtatgccgagactaaacacttcctgtactcatccggagacaaggaacagcttcggccgtccttcctcctgtcgtcgctcagaccgagcctgaccggagcacgcagattggtggaaactatcttccttgggtcacgtccgtggatgccaggtaccccacggcgcctcccgcgcctcccacagagatactggcagatgcggcctctgttcctggaattgctgggaaaccacgctcagtgcccgtacggagtcctgctcaagactcactgccctctgagggcggcggtcactccggcggccggagtgtgcgcacgggagaagccccagggaagcgtggcagctccggaagaggaggacaccgatccgcgccgcctcgtgcaacttctgcgccagcactcctcgccctggcaagtctacgggttcgtccgcgcctgcctgcgccgcctggtgccgcctgggctctggggttcccggcataacgagcgccgcttcctgagaaatactaagaagtttatctcacttggaaaacatgccaagttgtcgctgcaagaactcacgtggaagatgtcagtccgcgattgcgcctggctgcgccgctcgccgggcgtcgggtgtgttccagctgcagaacaccgcctgagagaagaaattctggccaaatttctgcattggctgatgtcagtgtacgtggtcgagctgctgcgctcctttttctacgtcactgagactacctttcaaaagaaccgcctgttcttctaccgcaaatctgtgtggagcaagctgcagtcaatcggcattcgccagcatctgaagagggtgcagctgcgggaactttccgaggcagaagtccgccagcaccgggaggcccggccggcgcttctcacgtcgcgtctgagattcatcccaaagcccgacgggctgaggcctatcgtcaacatggattacgtcgtgggcgctcgcacctttcgccgtgaaaagcgggccgaacgcttgacctcacgggtgaaggccctcttctccgtgctgaactacgagagagcaagacggcctggcctgctgggagcttcggtgctgggactggacgatatccaccgggcttggcggacctttgttctccgggtgagagcccaagaccctccgccggaactgtacttcgtgaaggtggcgatcaccggagcctatgatactattccgcaagatcgactcaccgaagtcatcgcctcgatcatcaaaccgcagaacacttactgcgtcaggcggtacgccgtggtccagaaggccgcgcatggccacgtgagaaaggcgttcaagtcgcacgtgtccactctcaccgacctccagccttacatgaggcaattcgttgcgcatttgcaagagacttcgcccctgagagatgcggtggtcatcgagcagagctccagcctgaacgaagcgagcagcggtctgtttgacgtgttcctccgcttcatgtgtcatcacgcggtgcgaatcaggggaaaatcatacgtgcagtgccagggaatcccacaaggcagcattctgtcgactctcttgtgttccctttgctacggcgatatggaaaacaagctgttcgctgggatcagacgggacgggttgctgctcagactggtggacgacttcctgctggtgactccgcacctcactcacgccaaaacctttctccgcactctggtgaggggagtgccagaatacggctgtgtggtcaatctccggaaaactgtggtgaatttccctgtcgaggatgaggcactcggaggaaccgcatttgtccaaatgccagcacatggcctgttcccatggtgcggtctgctgctggacacccgaactcttgaagtgcagtccgactactccagctatgcccggacgagcatccgcgccagcctcactttcaatcgcggctttaaggccggacgaaacatgcgcagaaagcttttcggagtcctccggcttaaatgccattcgctctttctcgatctccaagtcaattcgctgcagaccgtgtgcacgaacatctacaagatcctgctgctccaagcctaccggttccacgcttgcgtgcttcagctgccgtttcaccaacaggtgtggaagaacccgaccttctttctgcgggtcattagcgatactgcctccctgtgttactcaatcctcaaggcaaagaacgccggaatgtcgctgggtgcgaaaggagccgcgggacctcttcctagcgaagcggtgcagtggctctgccaccaggctttcctcctgaagctgaccaggcacagagtgacctacgtcccgctgctgggctcgctgcgcactgcacagacccagctgtctagaaaactccccggcaccaccctgaccgctctggaagccgccgccaacccagcattgccgtcagatttcaagaccatcttggac

SEQ ID NO: 51 - protein, 1943 aa, Artificial Sequence
  Synthetic Construct
MASTPGTQSPFFLLLLLTVLTVVTGSGHASSTPGGEKETSATQRSSVPSSTEKNAVSMTSSVLSSHSPGSGSSTTQGQDVTLAPATEPASGSAATWGQDVTSVPVTRPALGSTTPPAHDVTSAPDNKPAPGSTAPPAHGVTSAPDTRPAPGSTAPPAHGVTSAPDTRPAPGSTAPPAHGVTSAPDTRPAPGSTAPPAHGVTSAPDTRPAPGSTAPPAHGVTSAPDTRPALGSTAPPVHNVTSASGSASGSASTLVHNGTSARATTTPASKSTPFSIPSHHSDTPTTLASHSTKTDASSTHHSSVPPLTSSNHSTSPQLSTGVSFFFLSFHISNLQFNSSLEDPSTDYYQELQRDISEMFLQIYKQGGFLGLSNIKFRPGSVVVQLTLAFREGTINVHDVETQFNQYKTEAASRYNLTISDVSVSDVPFPFSAQSGAGVPGWGIALLVLVCVLVALAIVYLIALAVCQCRRKNYGQLDIFPARDTYHPMSEYPTYHTHGRYVPPSSTDRSPYEKVSAGNGGSSLSYTNPAVAAASANLGSGRIFNAHYAGYFADLLIHDIETNPGPKLTIESTPFNVAEGKEVLLLVHNLPQHLFGYSWYKGERVDGNRQIIGYVIGTQQATPGPAYSGREIIYPNASLLIQNIIQNDTGFYTLHVIKSDLVNEEATGQFRVYPELPKPFITSNNSNPVEDEDAVALTCEPEIQNTTYLWWVNNQSLPVSPRLQLSNDNRTLTLLSVTRNDVGPYECGIQNKLSVDHSDPVILNVLYGPDDPTISPSYTYYRPGVNLSLSCHAASNPPAQYSWLIDGNIQQHTQELFISNITEKNSGLYTCQANNSASGHSRTTVKTITVSAELPKPSISSNNSKPVEDKDAVAFTCEPEAQNTTYLWWVNGQSLPVSPRLQLSNGNRTLTLFNVTRNDARAYVCGIQNSVSANRSDPVTLDVLYGPDTPIISPPDSSYLSGANLNLSCHSASNPSPQYSWRINGIPQQHTQVLFIAKITPNNNGTYACFVSNLATGRNNSIVKSITVSASGSGEGRGSLLTCGDVEENPGPGAAPEPERTPVGQGSWAHPGRTRGPSDRGFCVVSPARPAEEATSLEGALSGTRHSHPSVGRQHHAGPPSTSRPPRPWDTPCPPVYAETKHFLYSSGDKEQLRPSFLLSSLRPSLTGARRLVETIFLGSRPWMPGTPRRLPRLPQRYWQMRPLFLELLGNHAQCPYGVLLKTHCPLRAAVTPAAGVCAREKPQGSVAAPEEEDTDPRRLVQLLRQHSSPWQVYGFVRACLRRLVPPGLWGSRHNERRFLRNTKKFISLGKHAKLSLQELTWKMSVRDCAWLRRSPGVGCVPAAEHRLREEILAKFLHWLMSVYVVELLRSFFYVTETTFQKNRLFFYRKSVWSKLQSIGIRQHLKRVQLRELSEAEVRQHREARPALLTSRLRFIPKPDGLRPIVNMDYVVGARTFRREKRAERLTSRVKALFSVLNYERARRPGLLGASVLGLDDIHRAWRTFVLRVRAQDPPPELYFVKVAITGAYDTIPQDRLTEVIASIIKPQNTYCVRRYAVVQKAAHGHVRKAFKSHVSTLTDLQPYMRQFVAHLQETSPLRDAVVIEQSSSLNEASSGLFDVFLRFMCHHAVRIRGKSYVQCQGIPQGSILSTLLCSLCYGDMENKLFAGIRRDGLLLRLVDDFLLVTPHLTHAKTFLRTLVRGVPEYGCVVNLRKTVVNFPVEDEALGGTAFVQMPAHGLFPWCGLLLDTRTLEVQSDYSSYARTSIRASLTFNRGFKAGRNMRRKLFGVLRLKCHSLFLDLQVNSLQTVCTNIYKILLLQAYRFHACVLQLPFHQQVWKNPTFFLRVISDTASLCYSILKAKNAGMSLGAKGAAGPLPSEAVQWLCHQAFLLKLTRHRVTYVPLLGSLRTAQTQLSRKLPGTTLTALEAAANPALPSDFKTILD

SEQ ID NO: 52 - DNA, 5829 bp, Artificial Sequence
  Synthetic Construct
atggctagcaagctgaccattgagagcactcccttcaacgtggctgaggggaaggaggtgctgctcctggtgcacaatctgccccagcacctgttcgggtactcctggtacaagggagaacgcgtggacgggaaccggcagatcataggctacgtcatcggaacccagcaggccacacccggtccagcgtacagcggccgggagattatctacccgaacgcctccctgctgatccaaaacatcatccagaacgacaccggtttctacactctgcacgtgattaagtcagatctggtcaacgaagaggccaccggccaattcagggtgtaccccgaactccctaagccgttcatcacctcgaacaacagcaacccggtcgaggatgaagatgcggtggccttgacgtgcgaacctgagatccagaacaccacctacttgtggtgggtgaacaatcagagcctgccagtctccccacgactccagctgtcgaacgacaacaggaccctgactttgctgtccgtgactcggaacgacgtgggcccttatgaatgcggtatccagaacaagctgtccgtggaccacagcgaccctgtgatcctgaacgtcctttacgggccggacgaccccaccatttccccgtcgtacacttactaccggccgggcgtgaacctgtccctgtcgtgccacgctgcctccaatccgccggcccagtactcctggctcatcgacggaaacatccagcagcacacccaagaactgttcatctccaacattaccgagaaaaactcgggactttacacctgtcaagccaacaattccgccagcggccactcccgcaccactgtcaaaactatcactgtgtccgccgaactcccgaagcccagcatcagctccaacaactcgaagcccgtggaggataaggacgctgtcgcgttcacctgtgaaccagaggcacagaataccacctacctttggtgggtcaacggacagtccctgcctgtctcaccgagactgcagctgtcaaacgggaataggactctgaccttgtttaacgtcacccggaacgacgcccgggcctacgtgtgcggcatccagaactccgtgagcgcaaaccggtctgacccagtgaccctggatgtgctgtacggccccgacactccgatcatttcaccccccgattcatcctacctgtccggcgctaacctcaacctctcatgccactccgcatccaaccccagcccgcaatattcgtggcgcattaacggaattcctcagcaacatacccaggtcctgttcattgcgaagatcacccctaacaacaacggaacctacgcctgctttgtgtcaaacctggccactggtagaaacaactccatcgtgaagtccattaccgtgtcggcgtccggatccggcgagggcagaggcagcctgctgacatgtggcgacgtggaagagaaccctggccccggagctgccccggagccggagaggacccccgttggccagggatcgtgggcccatccgggacgcaccaggggaccatccgacaggggattctgtgtggtgtcaccggccaggccagcagaagaggcaaccagcctcgagggagcgttgtctggaaccagacattcccacccgtcggtgggccggcagcaccacgcgggaccaccgtccacttccagaccgccacggccatgggacaccccttgcccgcctgtgtatgccgagactaaacacttcctgtactcatccggagacaaggaacagcttcggccgtccttcctcctgtcgtcgctcagaccgagcctgaccggagcacgcagattggtggaaactatcttccttgggtcacgtccgtggatgccaggtaccccacggcgcctcccgcgcctcccacagagatactggcagatgcggcctctgttcctggaattgctgggaaaccacgctcagtgcccgtacggagtcctgctcaagactcactgccctctgagggcggcggtcactccggcggccggagtgtgcgcacgggagaagccccagggaagcgtggcagctccggaagaggaggacaccgatccgcgccgcctcgtgcaacttctgcgccagcactcctcgccctggcaagtctacgggttcgtccgcgcctgcctgcgccgcctggtgccgcctgggctctggggttcccggcataacgagcgccgcttcctgagaaatactaagaagtttatctcacttggaaaacatgccaagttgtcgctgcaagaactcacgtggaagatgtcagtccgcgattgcgcctggctgcgccgctcgccgggcgtcgggtgtgttccagctgcagaacaccgcctgagagaagaaattctggccaaatttctgcattggctgatgtcagtgtacgtggtcgagctgctgcgctcctttttctacgtcactgagactacctttcaaaagaaccgcctgttcttctaccgcaaatctgtgtggagcaagctgcagtcaatcggcattcgccagcatctgaagagggtgcagctgcgggaactttccgaggcagaagtccgccagcaccgggaggcccggccggcgcttctcacgtcgcgtctgagattcatcccaaagcccgacgggctgaggcctatcgtcaacatggattacgtcgtgggcgctcgcacctttcgccgtgaaaagcgggccgaacgcttgacctcacgggtgaaggccctcttctccgtgctgaactacgagagagcaagacggcctggcctgctgggagcttcggtgctgggactggacgatatccaccgggcttggcggacctttgttctccgggtgagagcccaagaccctccgccggaactgtacttcgtgaaggtggcgatcaccggagcctatgatactattccgcaagatcgactcaccgaagtcatcgcctcgatcatcaaaccgcagaacacttactgcgtcaggcggtacgccgtggtccagaaggccgcgcatggccacgtgagaaaggcgttcaagtcgcacgtgtccactctcaccgacctccagccttacatgaggcaattcgttgcgcatttgcaagagacttcgcccctgagagatgcggtggtcatcgagcagagctccagcctgaacgaagcgagcagcggtctgtttgacgtgttcctccgcttcatgtgtcatcacgcggtgcgaatcaggggaaaatcatacgtgcagtgccagggaatcccacaaggcagcattctgtcgactctcttgtgttccctttgctacggcgatatggaaaacaagctgttcgctgggatcagacgggacgggttgctgctcagactggtggacgacttcctgctggtgactccgcacctcactcacgccaaaacctttctccgcactctggtgaggggagtgccagaatacggctgtgtggtcaatctccggaaaactgtggtgaatttccctgtcgaggatgaggcactcggaggaaccgcatttgtccaaatgccagcacatggcctgttcccatggtgcggtctgctgctggacacccgaactcttgaagtgcagtccgactactccagctatgcccggacgagcatccgcgccagcctcactttcaatcgcggctttaaggccggacgaaacatgcgcagaaagcttttcggagtcctccggcttaaatgccattcgctctttctcgatctccaagtcaattcgctgcagaccgtgtgcacgaacatctacaagatcctgctgctccaagcctaccggttccacgcttgcgtgcttcagctgccgtttcaccaacaggtgtggaagaacccgaccttctttctgcgggtcattagcgatactgcctccctgtgttactcaatcctcaaggcaaagaacgccggaatgtcgctgggtgcgaaaggagccgcgggacctcttcctagcgaagcggtgcagtggctctgccaccaggctttcctcctgaagctgaccaggcacagagtgacctacgtcccgctgctgggctcgctgcgcactgcacagacccagctgtctagaaaactccccggcaccaccctgaccgctctggaagccgccgccaacccagcattgccgtcagatttcaagaccatcttggacggatccggcacaatcctgtctgagggcgccaccaacttcagcctgctgaaactggccggcgacgtggaactgaaccctggccctacccctggaacccagagccccttcttccttctgctgctgctgaccgtgctgactgtcgtgacaggctctggccacgccagctctacacctggcggcgagaaagagacaagcgccacccagagaagcagcgtgccaagcagcaccgagaagaacgccgtgtccatgaccagctccgtgctgagcagccactctcctggcagcggcagcagcacaacacagggccaggatgtgacactggcccctgccacagaacctgcctctggatctgccgccacctggggacaggacgtgacaagcgtgccagtgaccagacctgccctgggctctacaacaccccctgcccacgatgtgaccagcgcccctgataacaagcctgcccctggaagcacagcccctccagctcatggcgtgacctctgccccagataccagaccagccccaggatctacagccccacccgcacacggcgtgacaagtgcccctgacacaagacccgctccaggctctactgctcctcctgcccatggcgtgacaagcgctcccgatacaaggccagctcctggctccacagcaccaccagcacatggcgtgacatcagctcccgacactagacctgctcccggatcaaccgctccaccagctcacggcgtgaccagcgcacctgataccagacctgctctgggaagcaccgcccctcccgtgcacaatgtgacatctgcttccggcagcgccagcggctctgcctctacactggtgcacaacggcaccagcgccagagccacaacaaccccagccagcaagagcacccccttcagcatccctagccaccacagcgacacccctaccacactggccagccactccaccaagaccgatgcctctagcacccaccactccagcgtgccccctctgaccagcagcaaccacagcacaagcccccagctgtctaccggcgtctcattcttctttctgtccttccacatcagcaacctgcagttcaacagcagcctggaagatcccagcaccgactactaccaggaactgcagcgggatatcagcgagatgttcctgcaaatctacaagcagggcggcttcctgggcctgagcaacatcaagttcagacccggcagcgtggtggtgcagctgaccctggctttccgggaaggcaccatcaacgtgcacgacgtggaaacccagttcaaccagtacaagaccgaggccgccagccggtacaacctgaccatctccgatgtgtccgtgtccgacgtgcccttcccattctctgcccagtctggcgcaggcgtgccaggatggggaattgctctgctggtgctcgtgtgcgtgctggtggccctggccatcgtgtatctgattgccctggccgtgtgccagtgccggcggaagaattacggccagctggacatcttccccgccagagacacctaccaccccatgagcgagtaccccacataccacacccacggcagatacgtgccacccagctccaccgacagatccccctacgagaaagtgtctgccggcaacggcggcagctccctgagctacacaaatcctgccgtggccgctgcctccgccaacctg

SEQ ID NO: 53 - protein, 1943 aa, Artificial Sequence
  Synthetic Construct
MASKLTIESTPFNVAEGKEVLLLVHNLPQHLFGYSWYKGERVDGNRQIIGYVIGTQQATPGPAYSGREIIYPNASLLIQNIIQNDTGFYTLHVIKSDLVNEEATGQFRVYPELPKPFITSNNSNPVEDEDAVALTCEPEIQNTTYLWWVNNQSLPVSPRLQLSNDNRTLTLLSVTRNDVGPYECGIQNKLSVDHSDPVILNVLYGPDDPTISPSYTYYRPGVNLSLSCHAASNPPAQYSWLIDGNIQQHTQELFISNITEKNSGLYTCQANNSASGHSRTTVKTITVSAELPKPSISSNNSKPVEDKDAVAFTCEPEAQNTTYLWWVNGQSLPVSPRLQLSNGNRTLTLFNVTRNDARAYVCGIQNSVSANRSDPVTLDVLYGPDTPIISPPDSSYLSGANLNLSCHSASNPSPQYSWRINGIPQQHTQVLFIAKITPNNNGTYACFVSNLATGRNNSIVKSITVSASGSGEGRGSLLTCGDVEENPGPGAAPEPERTPVGQGSWAHPGRTRGPSDRGFCVVSPARPAEEATSLEGALSGTRHSHPSVGRQHHAGPPSTSRPPRPWDTPCPPVYAETKHFLYSSGDKEQLRPSFLLSSLRPSLTGARRLVETIFLGSRPWMPGTPRRLPRLPQRYWQMRPLFLELLGNHAQCPYGVLLKTHCPLRAAVTPAAGVCAREKPQGSVAAPEEEDTDPRRLVQLLRQHSSPWQVYGFVRACLRRLVPPGLWGSRHNERRFLRNTKKFISLGKHAKLSLQELTWKMSVRDCAWLRRSPGVGCVPAAEHRLREEILAKFLHWLMSVYVVELLRSFFYVTETTFQKNRLFFYRKSVWSKLQSIGIRQHLKRVQLRELSEAEVRQHREARPALLTSRLRFIPKPDGLRPIVNMDYVVGARTFRREKRAERLTSRVKALFSVLNYERARRPGLLGASVLGLDDIHRAWRTFVLRVRAQDPPPELYFVKVAITGAYDTIPQDRLTEVIASIIKPQNTYCVRRYAVVQKAAHGHVRKAFKSHVSTLTDLQPYMRQFVAHLQETSPLRDAVVIEQSSSLNEASSGLFDVFLRFMCHHAVRIRGKSYVQCQGIPQGSILSTLLCSLCYGDMENKLFAGIRRDGLLLRLVDDFLLVTPHLTHAKTFLRTLVRGVPEYGCVVNLRKTVVNFPVEDEALGGTAFVQMPAHGLFPWCGLLLDTRTLEVQSDYSSYARTSIRASLTFNRGFKAGRNMRRKLFGVLRLKCHSLFLDLQVNSLQTVCTNIYKILLLQAYRFHACVLQLPFHQQVWKNPTFFLRVISDTASLCYSILKAKNAGMSLGAKGAAGPLPSEAVQWLCHQAFLLKLTRHRVTYVPLLGSLRTAQTQLSRKLPGTTLTALEAAANPALPSDFKTILDGSGTILSEGATNFSLLKLAGDVELNPGPTPGTQSPFFLLLLLTVLTVVTGSGHASSTPGGEKETSATQRSSVPSSTEKNAVSMTSSVLSSHSPGSGSSTTQGQDVTLAPATEPASGSAATWGQDVTSVPVTRPALGSTTPPAHDVTSAPDNKPAPGSTAPPAHGVTSAPDTRPAPGSTAPPAHGVTSAPDTRPAPGSTAPPAHGVTSAPDTRPAPGSTAPPAHGVTSAPDTRPAPGSTAPPAHGVTSAPDTRPALGSTAPPVHNVTSASGSASGSASTLVHNGTSARATTTPASKSTPFSIPSHHSDTPTTLASHSTKTDASSTHHSSVPPLTSSNHSTSPQLSTGVSFFFLSFHISNLQFNSSLEDPSTDYYQELQRDISEMFLQIYKQGGFLGLSNIKFRPGSVVVQLTLAFREGTINVHDVETQFNQYKTEAASRYNLTISDVSVSDVPFPFSAQSGAGVPGWGIALLVLVCVLVALAIVYLIALAVCQCRRKNYGQLDIFPARDTYHPMSEYPTYHTHGRYVPPSSTDRSPYEKVSAGNGGSSLSYTNPAVAAASANL

SEQ ID NO: 54 - DNA, 5859 bp, Artificial Sequence
  Synthetic Construct
ggcgtaatgctctgccagtgttacaaccaattaaccaattctgattagaaaaactcatcgagcatcaaatgaaactgcaatttattcatatcaggattatcaataccatatttttgaaaaagccgtttctgtaatgaaggagaaaactcaccgaggcagttccataggatggcaagatcctggtatcggtctgcgattccgactcgtccaacatcaatacaacctattaatttcccctcgtcaaaaataaggttatcaagtgagaaatcaccatgagtgacgactgaatccggtgagaatggcaaaagcttatgcatttctttccagacttgttcaacaggccagccattacgctcgtcatcaaaatcactcgcatcaaccaaaccgttattcattcgtgattgcgcctgagcgagacgaaatacgcgatcgctgttaaaaggacaattacaaacaggaatcaaatgcaaccggcgcaggaacactgccagcgcatcaacaatattttcacctgaatcaggatattcttctaatacctggaatgctgttttcccggggatcgcagtggtgagtaaccatgcatcatcaggagtacggataaaatgcttgatggtcggaagaggcataaattccgtcagccagtttagtctgaccatctcatctgtaacatcattggcaacgctacctttgccatgtttcagaaacaactctggcgcatcgggcttcccatacaatcgatagattgtcgcacctgattgcccgacattatcgcgagcccatttatacccatataaatcagcatccatgttggaatttaatcgcggcctcgagcaagacgtttcccgttgaatatggctcataacaccccttgtattactgtttatgtaagcagacaggtcgacaatattggctattggccattgcatacgttgtatctatatcataatatgtacatttatattggctcatgtccaatatgaccgccatgttgacattgattattgactagttattaatagtaatcaattacggggtcattagttcatagcccatatatggagttccgcgttacataacttacggtaaatggcccgcctggctgaccgcccaacgacccccgcccattgacgtcaataatgacgtatgttcccatagtaacgccaatagggactttccattgacgtcaatgggtggagtatttacggtaaactgcccacttggcagtacatcaagtgtatcatatgccaagtccgccccctattgacgtcaatgacggtaaatggcccgcctggcattatgcccagtacatgaccttacgggactttcctacttggcagtacatctacgtattagtcatcgctattaccatggtgatgcggttttggcagtacaccaatgggcgtggatagcggtttgactcacggggatttccaagtctccaccccattgacgtcaatgggagtttgttttggcaccaaaatcaacgggactttccaaaatgtcgtaataaccccgccccgttgacgcaaatgggcggtaggcgtgtacggtgggaggtctatataagcagagctcgtttagtgaaccgtcagatcgcctggagacgccatccacgctgttttgacctccatagaagacaccgggaccgatccagcctccgcggccgggaacggtgcattggaacgcggattccccgtgccaagagtgactcaccgtccggatctcagcaagcaggtatgtactctccagggtgggcctggcttccccagtcaagactccagggatttgagggacgctgtgggctcttctcttacatgtaccttttgcttgcctcaaccctgactatcttccaggtcaggatcccagagtcaggggtctgtattttcctgctggtggctccagttcaggaacagtaaaccctgctccgaatattgcctctcacatctcgtcaatctccgcgaggactggggaccctgtgacgaacatggctagcgaatcgccaagcgcaccccctcatcggtggtgcatcccttggcaacgcctcctcctgaccgcctcactgctgactttctggaacccgccgaccaccgcaaagctgaccattgagagcactcccttcaacgtggctgaggggaaggaggtgctgctcctggtgcacaatctgccccagcacctgttcgggtactcctggtacaagggagaacgcgtggacgggaaccggcagatcataggctacgtcatcggaacccagcaggccacacccggtccagcgtacagcggccgggagattatctacccgaacgcctccctgctgatccaaaacatcatccagaacgacaccggtttctacactctgcacgtgattaagtcagatctggtcaacgaagaggccaccggccaattcagggtgtaccccgaactcccaaagccgtccatttcaagcaacaactccaagccggtggaggacaaagacgccgtggccttcacttgtgaacctgaaacccaggacgccacttacctttggtgggtgaacaaccagtcgctccccgtgtcgccgaggctgcagctcagcaacggaaacagaacgctgaccctcttcaatgtgacccgcaatgataccgcctcctataagtgcgaaacccagaatccggtgtccgcccggcgctcggatagcgtgattctgaacgtgctctacggccctgacgcccccactatctcccctctgaacacttcctaccggtccggagagaacctgaacctgagctgccacgcggcgtccaacccgcccgcccagtacagctggttcgtgaatgggacgttccagcagtccacccaggagctgtttatccctaacattaccgtcaacaactctggatcgtacacatgccaagcgcataactcggacactgggcttaacagaaccaccgtgacaaccatcactgtgtatgcggaacctcctaagccgttcatcacctcgaacaacagcaacccggtcgaggatgaagatgcggtggccttgacgtgcgaacctgagatccagaacaccacctacttgtggtgggtgaacaatcagagcctgccagtctccccacgactccagctgtcgaacgacaacaggaccctgactttgctgtccgtgactcggaacgacgtgggcccttatgaatgcggtatccagaacaagctgtccgtggaccacagcgaccctgtgatcctgaacgtcctttacgggccggacgaccccaccatttccccgtcgtacacttactaccggccgggcgtgaacctgtccctgtcgtgccacgctgcctccaatccgccggcccagtactcctggctcatcgacggaaacatccagcagcacacccaagaactgttcatctccaacattaccgagaaaaactcgggactttacacctgtcaagccaacaattccgccagcggccactcccgcaccactgtcaaaactatcactgtgtccgccgaactcccgaagcccagcatcagctccaacaactcgaagcccgtggaggataaggacgctgtcgcgttcacctgtgaaccagaggcacagaataccacctacctttggtgggtcaacggacagtccctgcctgtctcaccgagactgcagctgtcaaacgggaataggactctgaccttgtttaacgtcacccggaacgacgcccgggcctacgtgtgcggcatccagaactccgtgagcgcaaaccggtctgacccagtgaccctggatgtgctgtacggccccgacactccgatcatttcaccccccgattcatcctacctgtccggcgctaacctcaacctctcatgccactccgcatccaaccccagcccgcaatattcgtggcgcattaacggaattcctcagcaacatacccaggtcctgttcattgcgaagatcacccctaacaacaacggaacctacgcctgctttgtgtcaaacctggccactggtagaaacaactccatcgtgaagtccattaccgtgtcggcgtccggaacttccccgggcctgagcgccggcgccaccgtgggaattatgatcggcgtgctcgtgggagtggccctgatctgaagatctgggccctaacaaaacaaaaagatggggttattccctaaacttcatgggttacgtaattggaagttgggggacattgccacaagatcatattgtacaaaagatcaaacactgttttagaaaacttcctgtaaacaggcctattgattggaaagtatgtcaaaggattgtgggtcttttgggctttgctgctccatttacacaatgtggatatcctgccttaatgcctttgtatgcatgtatacaagctaaacaggctttcactttctcgccaacttacaaggcctttctaagtaaacagtacatgaacctttaccccgttgctcggcaacggcctggtctgtgccaagtgtttgctgacgcaacccccactggctggggcttggccataggccatcagcgcatgcgtggaacctttgtggctcctctgccgatccatactgcggaactcctagccgcttgttttgctcgcagccggtctggagcaaagctcataggaactgacaattctgtcgtcctctcgcggaaatatacatcgtttcgatctacgtatgatctttttccctctgccaaaaattatggggacatcatgaagccccttgagcatctgacttctggctaataaaggaaatttattttcattgcaatagtgtgttggaattttttgtgtctctcactcggaaggaattctgcattaatgaatcggccaacgcgcggggagaggcggtttgcgtattgggcgctcttccgcttcctcgctcactgactcgctgcgctcggtcgttcggctgcggcgagcggtatcagctcactcaaaggcggtaatacggttatccacagaatcaggggataacgcaggaaagaacatgtgagcaaaaggccagcaaaaggccaggaaccgtaaaaaggccgcgttgctggcgtttttccataggctccgcccccctgacgagcatcacaaaaatcgacgctcaagtcagaggtggcgaaacccgacaggactataaagataccaggcgtttccccctggaagctccctcgtgcgctctcctgttccgaccctgccgcttaccggatacctgtccgcctttctcccttcgggaagcgtggcgctttctcatagctcacgctgtaggtatctcagttcggtgtaggtcgttcgctccaagctgggctgtgtgcacgaaccccccgttcagcccgaccgctgcgccttatccggtaactatcgtcttgagtccaacccggtaagacacgacttatcgccactggcagcagccactggtaacaggattagcagagcgaggtatgtaggcggtgctacagagttcttgaagtggtggcctaactacggctacactagaagaacagtatttggtatctgcgctctgctgaagccagttaccttcggaaaaagagttggtagctcttgatccggcaaacaaaccaccgctggtagcggtggtttttttgtttgcaagcagcagattacgcgcagaaaaaaaggatctcaagaagatcctttgatcttttctacggggtctgacgctcagtggaacgaaaactcacgttaagggattttggtcatgagattatcaaaaaggatcttcacctagatccttttaaattaaaaatgaagttttaaatcaatctaaagtatatatgagtaaacttggtctgacagttaccaatgcttaatcagtgaggcacctatctcagcgatctgtctatttcgttcatccatagttgcctgactc

SEQ ID NO: 55 - DNA, 5151 bp, Artificial Sequence
  Synthetic Construct
ggcgtaatgctctgccagtgttacaaccaattaaccaattctgattagaaaaactcatcgagcatcaaatgaaactgcaatttattcatatcaggattatcaataccatatttttgaaaaagccgtttctgtaatgaaggagaaaactcaccgaggcagttccataggatggcaagatcctggtatcggtctgcgattccgactcgtccaacatcaatacaacctattaatttcccctcgtcaaaaataaggttatcaagtgagaaatcaccatgagtgacgactgaatccggtgagaatggcaaaagcttatgcatttctttccagacttgttcaacaggccagccattacgctcgtcatcaaaatcactcgcatcaaccaaaccgttattcattcgtgattgcgcctgagcgagacgaaatacgcgatcgctgttaaaaggacaattacaaacaggaatcaaatgcaaccggcgcaggaacactgccagcgcatcaacaatattttcacctgaatcaggatattcttctaatacctggaatgctgttttcccggggatcgcagtggtgagtaaccatgcatcatcaggagtacggataaaatgcttgatggtcggaagaggcataaattccgtcagccagtttagtctgaccatctcatctgtaacatcattggcaacgctacctttgccatgtttcagaaacaactctggcgcatcgggcttcccatacaatcgatagattgtcgcacctgattgcccgacattatcgcgagcccatttatacccatataaatcagcatccatgttggaatttaatcgcggcctcgagcaagacgtttcccgttgaatatggctcataacaccccttgtattactgtttatgtaagcagacaggtcgacaatattggctattggccattgcatacgttgtatctatatcataatatgtacatttatattggctcatgtccaatatgaccgccatgttgacattgattattgactagttattaatagtaatcaattacggggtcattagttcatagcccatatatggagttccgcgttacataacttacggtaaatggcccgcctggctgaccgcccaacgacccccgcccattgacgtcaataatgacgtatgttcccatagtaacgccaatagggactttccattgacgtcaatgggtggagtatttacggtaaactgcccacttggcagtacatcaagtgtatcatatgccaagtccgccccctattgacgtcaatgacggtaaatggcccgcctggcattatgcccagtacatgaccttacgggactttcctacttggcagtacatctacgtattagtcatcgctattaccatggtgatgcggttttggcagtacaccaatgggcgtggatagcggtttgactcacggggatttccaagtctccaccccattgacgtcaatgggagtttgttttggcaccaaaatcaacgggactttccaaaatgtcgtaataaccccgccccgttgacgcaaatgggcggtaggcgtgtacggtgggaggtctatataagcagagctcgtttagtgaaccgtcagatcgcctggagacgccatccacgctgttttgacctccatagaagacaccgggaccgatccagcctccgcggccgggaacggtgcattggaacgcggattccccgtgccaagagtgactcaccgtccggatctcagcaagcaggtatgtactctccagggtgggcctggcttccccagtcaagactccagggatttgagggacgctgtgggctcttctcttacatgtaccttttgcttgcctcaaccctgactatcttccaggtcaggatcccagagtcaggggtctgtattttcctgctggtggctccagttcaggaacagtaaaccctgctccgaatattgcctctcacatctcgtcaatctccgcgaggactggggaccctgtgacgaacatggctagcaagctgaccattgagagcactcccttcaacgtggctgaggggaaggaggtgctgctcctggtgcacaatctgccccagcacctgttcgggtactcctggtacaagggagaacgcgtggacgggaaccggcagatcataggctacgtcatcggaacccagcaggccacacccggtccagcgtacagcggccgggagattatctacccgaacgcctccctgctgatccaaaacatcatccagaacgacaccggtttctacactctgcacgtgattaagtcagatctggtcaacgaagaggccaccggccaattcagggtgtaccccgaactccctaagccgttcatcacctcgaacaacagcaacccggtcgaggatgaagatgcggtggccttgacgtgcgaacctgagatccagaacaccacctacttgtggtgggtgaacaatcagagcctgccagtctccccacgactccagctgtcgaacgacaacaggaccctgactttgctgtccgtgactcggaacgacgtgggcccttatgaatgcggtatccagaacaagctgtccgtggaccacagcgaccctgtgatcctgaacgtcctttacgggccggacgaccccaccatttccccgtcgtacacttactaccggccgggcgtgaacctgtccctgtcgtgccacgctgcctccaatccgccggcccagtactcctggctcatcgacggaaacatccagcagcacacccaagaactgttcatctccaacattaccgagaaaaactcgggactttacacctgtcaagccaacaattccgccagcggccactcccgcaccactgtcaaaactatcactgtgtccgccgaactcccgaagcccagcatcagctccaacaactcgaagcccgtggaggataaggacgctgtcgcgttcacctgtgaaccagaggcacagaataccacctacctttggtgggtcaacggacagtccctgcctgtctcaccgagactgcagctgtcaaacgggaataggactctgaccttgtttaacgtcacccggaacgacgcccgggcctacgtgtgcggcatccagaactccgtgagcgcaaaccggtctgacccagtgaccctggatgtgctgtacggccccgacactccgatcatttcaccccccgattcatcctacctgtccggcgctaacctcaacctctcatgccactccgcatccaaccccagcccgcaatattcgtggcgcattaacggaattcctcagcaacatacccaggtcctgttcattgcgaagatcacccctaacaacaacggaacctacgcctgctttgtgtcaaacctggccactggtagaaacaactccatcgtgaagtccattaccgtgtcggcgtcctgaagatctgggccctaacaaaacaaaaagatggggttattccctaaacttcatgggttacgtaattggaagttgggggacattgccacaagatcatattgtacaaaagatcaaacactgttttagaaaacttcctgtaaacaggcctattgattggaaagtatgtcaaaggattgtgggtcttttgggctttgctgctccatttacacaatgtggatatcctgccttaatgcctttgtatgcatgtatacaagctaaacaggctttcactttctcgccaacttacaaggcctttctaagtaaacagtacatgaacctttaccccgttgctcggcaacggcctggtctgtgccaagtgtttgctgacgcaacccccactggctggggcttggccataggccatcagcgcatgcgtggaacctttgtggctcctctgccgatccatactgcggaactcctagccgcttgttttgctcgcagccggtctggagcaaagctcataggaactgacaattctgtcgtcctctcgcggaaatatacatcgtttcgatctacgtatgatctttttccctctgccaaaaattatggggacatcatgaagccccttgagcatctgacttctggctaataaaggaaatttattttcattgcaatagtgtgttggaattttttgtgtctctcactcggaaggaattctgcattaatgaatcggccaacgcgcggggagaggcggtttgcgtattgggcgctcttccgcttcctcgctcactgactcgctgcgctcggtcgttcggctgcggcgagcggtatcagctcactcaaaggcggtaatacggttatccacagaatcaggggataacgcaggaaagaacatgtgagcaaaaggccagcaaaaggccaggaaccgtaaaaaggccgcgttgctggcgtttttccataggctccgcccccctgacgagcatcacaaaaatcgacgctcaagtcagaggtggcgaaacccgacaggactataaagataccaggcgtttccccctggaagctccctcgtgcgctctcctgttccgaccctgccgcttaccggatacctgtccgcctttctcccttcgggaagcgtggcgctttctcatagctcacgctgtaggtatctcagttcggtgtaggtcgttcgctccaagctgggctgtgtgcacgaaccccccgttcagcccgaccgctgcgccttatccggtaactatcgtcttgagtccaacccggtaagacacgacttatcgccactggcagcagccactggtaacaggattagcagagcgaggtatgtaggcggtgctacagagttcttgaagtggtggcctaactacggctacactagaagaacagtatttggtatctgcgctctgctgaagccagttaccttcggaaaaagagttggtagctcttgatccggcaaacaaaccaccgctggtagcggtggtttttttgtttgcaagcagcagattacgcgcagaaaaaaaggatctcaagaagatcctttgatcttttctacggggtctgacgctcagtggaacgaaaactcacgttaagggattttggtcatgagattatcaaaaaggatcttcacctagatccttttaaattaaaaatgaagttttaaatcaatctaaagtatatatgagtaaacttggtctgacagttaccaatgcttaatcagtgaggcacctatctcagcgatctgtctatttcgttcatccatagttgcctgactc

SEQ ID NO: 56 - DNA, 5325 bp, Artificial Sequence
  Synthetic Construct
ggcgtaatgctctgccagtgttacaaccaattaaccaattctgattagaaaaactcatcgagcatcaaatgaaactgcaatttattcatatcaggattatcaataccatatttttgaaaaagccgtttctgtaatgaaggagaaaactcaccgaggcagttccataggatggcaagatcctggtatcggtctgcgattccgactcgtccaacatcaatacaacctattaatttcccctcgtcaaaaataaggttatcaagtgagaaatcaccatgagtgacgactgaatccggtgagaatggcaaaagcttatgcatttctttccagacttgttcaacaggccagccattacgctcgtcatcaaaatcactcgcatcaaccaaaccgttattcattcgtgattgcgcctgagcgagacgaaatacgcgatcgctgttaaaaggacaattacaaacaggaatcaaatgcaaccggcgcaggaacactgccagcgcatcaacaatattttcacctgaatcaggatattcttctaatacctggaatgctgttttcccggggatcgcagtggtgagtaaccatgcatcatcaggagtacggataaaatgcttgatggtcggaagaggcataaattccgtcagccagtttagtctgaccatctcatctgtaacatcattggcaacgctacctttgccatgtttcagaaacaactctggcgcatcgggcttcccatacaatcgatagattgtcgcacctgattgcccgacattatcgcgagcccatttatacccatataaatcagcatccatgttggaatttaatcgcggcctcgagcaagacgtttcccgttgaatatggctcataacaccccttgtattactgtttatgtaagcagacaggtcgacaatattggctattggccattgcatacgttgtatctatatcataatatgtacatttatattggctcatgtccaatatgaccgccatgttgacattgattattgactagttattaatagtaatcaattacggggtcattagttcatagcccatatatggagttccgcgttacataacttacggtaaatggcccgcctggctgaccgcccaacgacccccgcccattgacgtcaataatgacgtatgttcccatagtaacgccaatagggactttccattgacgtcaatgggtggagtatttacggtaaactgcccacttggcagtacatcaagtgtatcatatgccaagtccgccccctattgacgtcaatgacggtaaatggcccgcctggcattatgcccagtacatgaccttacgggactttcctacttggcagtacatctacgtattagtcatcgctattaccatggtgatgcggttttggcagtacaccaatgggcgtggatagcggtttgactcacggggatttccaagtctccaccccattgacgtcaatgggagtttgttttggcaccaaaatcaacgggactttccaaaatgtcgtaataaccccgccccgttgacgcaaatgggcggtaggcgtgtacggtgggaggtctatataagcagagctcgtttagtgaaccgtcagatcgcctggagacgccatccacgctgttttgacctccatagaagacaccgggaccgatccagcctccgcggccgggaacggtgcattggaacgcggattccccgtgccaagagtgactcaccgtccggatctcagcaagcaggtatgtactctccagggtgggcctggcttccccagtcaagactccagggatttgagggacgctgtgggctcttctcttacatgtaccttttgcttgcctcaaccctgactatcttccaggtcaggatcccagagtcaggggtctgtattttcctgctggtggctccagttcaggaacagtaaaccctgctccgaatattgcctctcacatctcgtcaatctccgcgaggactggggaccctgtgacgaacatggctagcgaatcgccaagcgcaccccctcatcggtggtgcatcccttggcaacgcctcctcctgaccgcctcactgctgactttctggaacccgccgaccaccgcaaagctgaccattgagagcactcccttcaacgtggctgaggggaaggaggtgctgctcctggtgcacaatctgccccagcacctgttcgggtactcctggtacaagggagaacgcgtggacgggaaccggcagatcataggctacgtcatcggaacccagcaggccacacccggtccagcgtacagcggccgggagattatctacccgaacgcctccctgctgatccaaaacatcatccagaacgacaccggtttctacactctgcacgtgattaagtcagatctggtcaacgaagaggccaccggccaattcagggtgtaccccgaactccctaagccgttcatcacctcgaacaacagcaacccggtcgaggatgaagatgcggtggccttgacgtgcgaacctgagatccagaacaccacctacttgtggtgggtgaacaatcagagcctgccagtctccccacgactccagctgtcgaacgacaacaggaccctgactttgctgtccgtgactcggaacgacgtgggcccttatgaatgcggtatccagaacaagctgtccgtggaccacagcgaccctgtgatcctgaacgtcctttacgggccggacgaccccaccatttccccgtcgtacacttactaccggccgggcgtgaacctgtccctgtcgtgccacgctgcctccaatccgccggcccagtactcctggctcatcgacggaaacatccagcagcacacccaagaactgttcatctccaacattaccgagaaaaactcgggactttacacctgtcaagccaacaattccgccagcggccactcccgcaccactgtcaaaactatcactgtgtccgccgaactcccgaagcccagcatcagctccaacaactcgaagcccgtggaggataaggacgctgtcgcgttcacctgtgaaccagaggcacagaataccacctacctttggtgggtcaacggacagtccctgcctgtctcaccgagactgcagctgtcaaacgggaataggactctgaccttgtttaacgtcacccggaacgacgcccgggcctacgtgtgcggcatccagaactccgtgagcgcaaaccggtctgacccagtgaccctggatgtgctgtacggccccgacactccgatcatttcaccccccgattcatcctacctgtccggcgctaacctcaacctctcatgccactccgcatccaaccccagcccgcaatattcgtggcgcattaacggaattcctcagcaacatacccaggtcctgttcattgcgaagatcacccctaacaacaacggaacctacgcctgctttgtgtcaaacctggccactggtagaaacaactccatcgtgaagtccattaccgtgtcggcgtccggaacttccccgggcctgagcgccggcgccaccgtgggaattatgatcggcgtgctcgtgggagtggccctgatctgaagatctgggccctaacaaaacaaaaagatggggttattccctaaacttcatgggttacgtaattggaagttgggggacattgccacaagatcatattgtacaaaagatcaaacactgttttagaaaacttcctgtaaacaggcctattgattggaaagtatgtcaaaggattgtgggtcttttgggctttgctgctccatttacacaatgtggatatcctgccttaatgcctttgtatgcatgtatacaagctaaacaggctttcactttctcgccaacttacaaggcctttctaagtaaacagtacatgaacctttaccccgttgctcggcaacggcctggtctgtgccaagtgtttgctgacgcaacccccactggctggggcttggccataggccatcagcgcatgcgtggaacctttgtggctcctctgccgatccatactgcggaactcctagccgcttgttttgctcgcagccggtctggagcaaagctcataggaactgacaattctgtcgtcctctcgcggaaatatacatcgtttcgatctacgtatgatctttttccctctgccaaaaattatggggacatcatgaagccccttgagcatctgacttctggctaataaaggaaatttattttcattgcaatagtgtgttggaattttttgtgtctctcactcggaaggaattctgcattaatgaatcggccaacgcgcggggagaggcggtttgcgtattgggcgctcttccgcttcctcgctcactgactcgctgcgctcggtcgttcggctgcggcgagcggtatcagctcactcaaaggcggtaatacggttatccacagaatcaggggataacgcaggaaagaacatgtgagcaaaaggccagcaaaaggccaggaaccgtaaaaaggccgcgttgctggcgtttttccataggctccgcccccctgacgagcatcacaaaaatcgacgctcaagtcagaggtggcgaaacccgacaggactataaagataccaggcgtttccccctggaagctccctcgtgcgctctcctgttccgaccctgccgcttaccggatacctgtccgcctttctcccttcgggaagcgtggcgctttctcatagctcacgctgtaggtatctcagttcggtgtaggtcgttcgctccaagctgggctgtgtgcacgaaccccccgttcagcccgaccgctgcgccttatccggtaactatcgtcttgagtccaacccggtaagacacgacttatcgccactggcagcagccactggtaacaggattagcagagcgaggtatgtaggcggtgctacagagttcttgaagtggtggcctaactacggctacactagaagaacagtatttggtatctgcgctctgctgaagccagttaccttcggaaaaagagttggtagctcttgatccggcaaacaaaccaccgctggtagcggtggtttttttgtttgcaagcagcagattacgcgcagaaaaaaaggatctcaagaagatcctttgatcttttctacggggtctgacgctcagtggaacgaaaactcacgttaagggattttggtcatgagattatcaaaaaggatcttcacctagatccttttaaattaaaaatgaagttttaaatcaatctaaagtatatatgagtaaacttggtctgacagttaccaatgcttaatcagtgaggcacctatctcagcgatctgtctatttcgttcatccatagttgcctgactc

SEQ ID NO: 57 - DNA, 9756 bp, Artificial Sequence
  Synthetic Construct
ggcgtaatgctctgccagtgttacaaccaattaaccaattctgattagaaaaactcatcgagcatcaaatgaaactgcaatttattcatatcaggattatcaataccatatttttgaaaaagccgtttctgtaatgaaggagaaaactcaccgaggcagttccataggatggcaagatcctggtatcggtctgcgattccgactcgtccaacatcaatacaacctattaatttcccctcgtcaaaaataaggttatcaagtgagaaatcaccatgagtgacgactgaatccggtgagaatggcaaaagcttatgcatttctttccagacttgttcaacaggccagccattacgctcgtcatcaaaatcactcgcatcaaccaaaccgttattcattcgtgattgcgcctgagcgagacgaaatacgcgatcgctgttaaaaggacaattacaaacaggaatcaaatgcaaccggcgcaggaacactgccagcgcatcaacaatattttcacctgaatcaggatattcttctaatacctggaatgctgttttcccggggatcgcagtggtgagtaaccatgcatcatcaggagtacggataaaatgcttgatggtcggaagaggcataaattccgtcagccagtttagtctgaccatctcatctgtaacatcattggcaacgctacctttgccatgtttcagaaacaactctggcgcatcgggcttcccatacaatcgatagattgtcgcacctgattgcccgacattatcgcgagcccatttatacccatataaatcagcatccatgttggaatttaatcgcggcctcgagcaagacgtttcccgttgaatatggctcataacaccccttgtattactgtttatgtaagcagacaggtcgacaatattggctattggccattgcatacgttgtatctatatcataatatgtacatttatattggctcatgtccaatatgaccgccatgttgacattgattattgactagttattaatagtaatcaattacggggtcattagttcatagcccatatatggagttccgcgttacataacttacggtaaatggcccgcctggctgaccgcccaacgacccccgcccattgacgtcaataatgacgtatgttcccatagtaacgccaatagggactttccattgacgtcaatgggtggagtatttacggtaaactgcccacttggcagtacatcaagtgtatcatatgccaagtccgccccctattgacgtcaatgacggtaaatggcccgcctggcattatgcccagtacatgaccttacgggactttcctacttggcagtacatctacgtattagtcatcgctattaccatggtgatgcggttttggcagtacaccaatgggcgtggatagcggtttgactcacggggatttccaagtctccaccccattgacgtcaatgggagtttgttttggcaccaaaatcaacgggactttccaaaatgtcgtaataaccccgccccgttgacgcaaatgggcggtaggcgtgtacggtgggaggtctatataagcagagctcgtttagtgaaccgtcagatcgcctggagacgccatccacgctgttttgacctccatagaagacaccgggaccgatccagcctccgcggccgggaacggtgcattggaacgcggattccccgtgccaagagtgactcaccgtccggatctcagcaagcaggtatgtactctccagggtgggcctggcttccccagtcaagactccagggatttgagggacgctgtgggctcttctcttacatgtaccttttgcttgcctcaaccctgactatcttccaggtcaggatcccagagtcaggggtctgtattttcctgctggtggctccagttcaggaacagtaaaccctgctccgaatattgcctctcacatctcgtcaatctccgcgaggactggggaccctgtgacgaacatggctagcacccctggaacccagagccccttcttccttctgctgctgctgaccgtgctgactgtcgtgacaggctctggccacgccagctctacacctggcggcgagaaagagacaagcgccacccagagaagcagcgtgccaagcagcaccgagaagaacgccgtgtccatgaccagctccgtgctgagcagccactctcctggcagcggcagcagcacaacacagggccaggatgtgacactggcccctgccacagaacctgcctctggatctgccgccacctggggacaggacgtgacaagcgtgccagtgaccagacctgccctgggctctacaacaccccctgcccacgatgtgaccagcgcccctgataacaagcctgcccctggaagcacagcccctccagctcatggcgtgacctctgccccagataccagaccagccccaggatctacagccccacccgcacacggcgtgacaagtgcccctgacacaagacccgctccaggctctactgctcctcctgcccatggcgtgacaagcgctcccgatacaaggccagctcctggctccacagcaccaccagcacatggcgtgacatcagctcccgacactagacctgctcccggatcaaccgctccaccagctcacggcgtgaccagcgcacctgataccagacctgctctgggaagcaccgcccctcccgtgcacaatgtgacatctgcttccggcagcgccagcggctctgcctctacactggtgcacaacggcaccagcgccagagccacaacaaccccagccagcaagagcacccccttcagcatccctagccaccacagcgacacccctaccacactggccagccactccaccaagaccgatgcctctagcacccaccactccagcgtgccccctctgaccagcagcaaccacagcacaagcccccagctgtctaccggcgtctcattcttctttctgtccttccacatcagcaacctgcagttcaacagcagcctggaagatcccagcaccgactactaccaggaactgcagcgggatatcagcgagatgttcctgcaaatctacaagcagggcggcttcctgggcctgagcaacatcaagttcagacccggcagcgtggtggtgcagctgaccctggctttccgggaaggcaccatcaacgtgcacgacgtggaaacccagttcaaccagtacaagaccgaggccgccagccggtacaacctgaccatctccgatgtgtccgtgtccgacgtgcccttcccattctctgcccagtctggcgcaggcgtgccaggatggggaattgctctgctggtgctcgtgtgcgtgctggtggccctggccatcgtgtatctgattgccctggccgtgtgccagtgccggcggaagaattacggccagctggacatcttccccgccagagacacctaccaccccatgagcgagtaccccacataccacacccacggcagatacgtgccacccagctccaccgacagatccccctacgagaaagtgtctgccggcaacggcggcagctccctgagctacacaaatcctgccgtggccgctgcctccgccaacctgggatccggcacaatcctgtctgagggcgccaccaacttcagcctgctgaaactggccggcgacgtggaactgaaccctggccctggagctgccccggagccggagaggacccccgttggccagggatcgtgggcccatccgggacgcaccaggggaccatccgacaggggattctgtgtggtgtcaccggccaggccagcagaagaggcaaccagcctcgagggagcgttgtctggaaccagacattcccacccgtcggtgggccggcagcaccacgcgggaccaccgtccacttccagaccgccacggccatgggacaccccttgcccgcctgtgtatgccgagactaaacacttcctgtactcatccggagacaaggaacagcttcggccgtccttcctcctgtcgtcgctcagaccgagcctgaccggagcacgcagattggtggaaactatcttccttgggtcacgtccgtggatgccaggtaccccacggcgcctcccgcgcctcccacagagatactggcagatgcggcctctgttcctggaattgctgggaaaccacgctcagtgcccgtacggagtcctgctcaagactcactgccctctgagggcggcggtcactccggcggccggagtgtgcgcacgggagaagccccagggaagcgtggcagctccggaagaggaggacaccgatccgcgccgcctcgtgcaacttctgcgccagcactcctcgccctggcaagtctacgggttcgtccgcgcctgcctgcgccgcctggtgccgcctgggctctggggttcccggcataacgagcgccgcttcctgagaaatactaagaagtttatctcacttggaaaacatgccaagttgtcgctgcaagaactcacgtggaagatgtcagtccgcgattgcgcctggctgcgccgctcgccgggcgtcgggtgtgttccagctgcagaacaccgcctgagagaagaaattctggccaaatttctgcattggctgatgtcagtgtacgtggtcgagctgctgcgctcctttttctacgtcactgagactacctttcaaaagaaccgcctgttcttctaccgcaaatctgtgtggagcaagctgcagtcaatcggcattcgccagcatctgaagagggtgcagctgcgggaactttccgaggcagaagtccgccagcaccgggaggcccggccggcgcttctcacgtcgcgtctgagattcatcccaaagcccgacgggctgaggcctatcgtcaacatggattacgtcgtgggcgctcgcacctttcgccgtgaaaagcgggccgaacgcttgacctcacgggtgaaggccctcttctccgtgctgaactacgagagagcaagacggcctggcctgctgggagcttcggtgctgggactggacgatatccaccgggcttggcggacctttgttctccgggtgagagcccaagaccctccgccggaactgtacttcgtgaaggtggcgatcaccggagcctatgatactattccgcaagatcgactcaccgaagtcatcgcctcgatcatcaaaccgcagaacacttactgcgtcaggcggtacgccgtggtccagaaggccgcgcatggccacgtgagaaaggcgttcaagtcgcacgtgtccactctcaccgacctccagccttacatgaggcaattcgttgcgcatttgcaagagacttcgcccctgagagatgcggtggtcatcgagcagagctccagcctgaacgaagcgagcagcggtctgtttgacgtgttcctccgcttcatgtgtcatcacgcggtgcgaatcaggggaaaatcatacgtgcagtgccagggaatcccacaaggcagcattctgtcgactctcttgtgttccctttgctacggcgatatggaaaacaagctgttcgctgggatcagacgggacgggttgctgctcagactggtggacgacttcctgctggtgactccgcacctcactcacgccaaaacctttctccgcactctggtgaggggagtgccagaatacggctgtgtggtcaatctccggaaaactgtggtgaatttccctgtcgaggatgaggcactcggaggaaccgcatttgtccaaatgccagcacatggcctgttcccatggtgcggtctgctgctggacacccgaactcttgaagtgcagtccgactactccagctatgcccggacgagcatccgcgccagcctcactttcaatcgcggctttaaggccggacgaaacatgcgcagaaagcttttcggagtcctccggcttaaatgccattcgctctttctcgatctccaagtcaattcgctgcagaccgtgtgcacgaacatctacaagatcctgctgctccaagcctaccggttccacgcttgcgtgcttcagctgccgtttcaccaacaggtgtggaagaacccgaccttctttctgcgggtcattagcgatactgcctccctgtgttactcaatcctcaaggcaaagaacgccggaatgtcgctgggtgcgaaaggagccgcgggacctcttcctagcgaagcggtgcagtggctctgccaccaggctttcctcctgaagctgaccaggcacagagtgacctacgtcccgctgctgggctcgctgcgcactgcacagacccagctgtctagaaaactccccggcaccaccctgaccgctctggaagccgccgccaacccagcattgccgtcagatttcaagaccatcttggacggatccggccagtgcaccaattacgccctgctgaagctggccggcgacgtggaatctaaccctggccctgaatcgccaagcgcaccccctcatcggtggtgcatcccttggcaacgcctcctcctgaccgcctcactgctgactttctggaacccgccgaccaccgcaaagctgaccattgagagcactcccttcaacgtggctgaggggaaggaggtgctgctcctggtgcacaatctgccccagcacctgttcgggtactcctggtacaagggagaacgcgtggacgggaaccggcagatcataggctacgtcatcggaacccagcaggccacacccggtccagcgtacagcggccgggagattatctacccgaacgcctccctgctgatccaaaacatcatccagaacgacaccggtttctacactctgcacgtgattaagtcagatctggtcaacgaagaggccaccggccaattcagggtgtaccccgaactccctaagccgttcatcacctcgaacaacagcaacccggtcgaggatgaagatgcggtggccttgacgtgcgaacctgagatccagaacaccacctacttgtggtgggtgaacaatcagagcctgccagtctccccacgactccagctgtcgaacgacaacaggaccctgactttgctgtccgtgactcggaacgacgtgggcccttatgaatgcggtatccagaacaagctgtccgtggaccacagcgaccctgtgatcctgaacgtcctttacgggccggacgaccccaccatttccccgtcgtacacttactaccggccgggcgtgaacctgtccctgtcgtgccacgctgcctccaatccgccggcccagtactcctggctcatcgacggaaacatccagcagcacacccaagaactgttcatctccaacattaccgagaaaaactcgggactttacacctgtcaagccaacaattccgccagcggccactcccgcaccactgtcaaaactatcactgtgtccgccgaactcccgaagcccagcatcagctccaacaactcgaagcccgtggaggataaggacgctgtcgcgttcacctgtgaaccagaggcacagaataccacctacctttggtgggtcaacggacagtccctgcctgtctcaccgagactgcagctgtcaaacgggaataggactctgaccttgtttaacgtcacccggaacgacgcccgggcctacgtgtgcggcatccagaactccgtgagcgcaaaccggtctgacccagtgaccctggatgtgctgtacggccccgacactccgatcatttcaccccccgattcatcctacctgtccggcgctaacctcaacctctcatgccactccgcatccaaccccagcccgcaatattcgtggcgcattaacggaattcctcagcaacatacccaggtcctgttcattgcgaagatcacccctaacaacaacggaacctacgcctgctttgtgtcaaacctggccactggtagaaacaactccatcgtgaagtccattaccgtgtcggcgtccggaacttccccgggcctgagcgccggcgccaccgtgggaattatgatcggcgtgctcgtgggagtggccctgatctgaagatctgggccctaacaaaacaaaaagatggggttattccctaaacttcatgggttacgtaattggaagttgggggacattgccacaagatcatattgtacaaaagatcaaacactgttttagaaaacttcctgtaaacaggcctattgattggaaagtatgtcaaaggattgtgggtcttttgggctttgctgctccatttacacaatgtggatatcctgccttaatgcctttgtatgcatgtatacaagctaaacaggctttcactttctcgccaacttacaaggcctttctaagtaaacagtacatgaacctttaccccgttgctcggcaacggcctggtctgtgccaagtgtttgctgacgcaacccccactggctggggcttggccataggccatcagcgcatgcgtggaacctttgtggctcctctgccgatccatactgcggaactcctagccgcttgttttgctcgcagccggtctggagcaaagctcataggaactgacaattctgtcgtcctctcgcggaaatatacatcgtttcgatctacgtatgatctttttccctctgccaaaaattatggggacatcatgaagccccttgagcatctgacttctggctaataaaggaaatttattttcattgcaatagtgtgttggaattttttgtgtctctcactcggaaggaattctgcattaatgaatcggccaacgcgcggggagaggcggtttgcgtattgggcgctcttccgcttcctcgctcactgactcgctgcgctcggtcgttcggctgcggcgagcggtatcagctcactcaaaggcggtaatacggttatccacagaatcaggggataacgcaggaaagaacatgtgagcaaaaggccagcaaaaggccaggaaccgtaaaaaggccgcgttgctggcgtttttccataggctccgcccccctgacgagcatcacaaaaatcgacgctcaagtcagaggtggcgaaacccgacaggactataaagataccaggcgtttccccctggaagctccctcgtgcgctctcctgttccgaccctgccgcttaccggatacctgtccgcctttctcccttcgggaagcgtggcgctttctcatagctcacgctgtaggtatctcagttcggtgtaggtcgttcgctccaagctgggctgtgtgcacgaaccccccgttcagcccgaccgctgcgccttatccggtaactatcgtcttgagtccaacccggtaagacacgacttatcgccactggcagcagccactggtaacaggattagcagagcgaggtatgtaggcggtgctacagagttcttgaagtggtggcctaactacggctacactagaagaacagtatttggtatctgcgctctgctgaagccagttaccttcggaaaaagagttggtagctcttgatccggcaaacaaaccaccgctggtagcggtggtttttttgtttgcaagcagcagattacgcgcagaaaaaaaggatctcaagaagatcctttgatcttttctacggggtctgacgctcagtggaacgaaaactcacgttaagggattttggtcatgagattatcaaaaaggatcttcacctagatccttttaaattaaaaatgaagttttaaatcaatctaaagtatatatgagtaaacttggtctgacagttaccaatgcttaatcagtgaggcacctatctcagcgatctgtctatttcgttcatccatagttgcctgactc

SEQ ID NO: 58 - DNA, 36268 bp, Artificial Sequence
  Synthetic Construct
ccatcttcaataatatacctcaaactttttgtgcgcgttaatatgcaaatgaggcgtttgaatttggggaggaagggcggtgattggtcgagggatgagcgaccgttaggggcggggcgagtgacgttttgatgacgtggttgcgaggaggagccagtttgcaagttctcgtgggaaaagtgacgtcaaacgaggtgtggtttgaacacggaaatactcaattttcccgcgctctctgacaggaaatgaggtgtttctgggcggatgcaagtgaaaacgggccattttcgcgcgaaaactgaatgaggaagtgaaaatctgagtaatttcgcgtttatggcagggaggagtatttgccgagggccgagtagactttgaccgattacgtgggggtttcgattaccgtgtttttcacctaaatttccgcgtacggtgtcaaagtccggtgtttttactactgtaatagtaatcaattacggggtcattagttcatagcccatatatggagttccgcgttacataacttacggtaaatggcccgcctggctgaccgcccaacgacccccgcccattgacgtcaataatgacgtatgttcccatagtaacgccaatagggactttccattgacgtcaatgggtggagtatttacggtaaactgcccacttggcagtacatcaagtgtatcatatgccaagtacgccccctattgacgtcaatgacggtaaatggcccgcctggcattatgcccagtacatgaccttatgggactttcctacttggcagtacatctacgtattagtcatcgctattaccatggtgatgcggttttggcagtacatcaatgggcgtggatagcggtttgactcacggggatttccaagtctccaccccattgacgtcaatgggagtttgttttggcaccaaaatcaacgggactttccaaaatgtcgtaacaactccgccccattgacgcaaatgggcggtaggcgtgtacggtgggaggtctatataagcagagctgtccctatcagtgatagagatctccctatcagtgatagagagtttagtgaaccgtcagatccgctagggtaccgcgatcaccatggctagcacccctggaacccagagccccttcttccttctgctgctgctgaccgtgctgactgtcgtgacaggctctggccacgccagctctacacctggcggcgagaaagagacaagcgccacccagagaagcagcgtgccaagcagcaccgagaagaacgccgtgtccatgaccagctccgtgctgagcagccactctcctggcagcggcagcagcacaacacagggccaggatgtgacactggcccctgccacagaacctgcctctggatctgccgccacctggggacaggacgtgacaagcgtgccagtgaccagacctgccctgggctctacaacaccccctgcccacgatgtgaccagcgcccctgataacaagcctgcccctggaagcacagcccctccagctcatggcgtgacctctgccccagataccagaccagccccaggatctacagccccacccgcacacggcgtgacaagtgcccctgacacaagacccgctccaggctctactgctcctcctgcccatggcgtgacaagcgctcccgatacaaggccagctcctggctccacagcaccaccagcacatggcgtgacatcagctcccgacactagacctgctcccggatcaaccgctccaccagctcacggcgtgaccagcgcacctgataccagacctgctctgggaagcaccgcccctcccgtgcacaatgtgacatctgcttccggcagcgccagcggctctgcctctacactggtgcacaacggcaccagcgccagagccacaacaaccccagccagcaagagcacccccttcagcatccctagccaccacagcgacacccctaccacactggccagccactccaccaagaccgatgcctctagcacccaccactccagcgtgccccctctgaccagcagcaaccacagcacaagcccccagctgtctaccggcgtctcattcttctttctgtccttccacatcagcaacctgcagttcaacagcagcctggaagatcccagcaccgactactaccaggaactgcagcgggatatcagcgagatgttcctgcaaatctacaagcagggcggcttcctgggcctgagcaacatcaagttcagacccggcagcgtggtggtgcagctgaccctggctttccgggaaggcaccatcaacgtgcacgacgtggaaacccagttcaaccagtacaagaccgaggccgccagccggtacaacctgaccatctccgatgtgtccgtgtccgacgtgcccttcccattctctgcccagtctggcgcaggcgtgccaggatggggaattgctctgctggtgctcgtgtgcgtgctggtggccctggccatcgtgtatctgattgccctggccgtgtgccagtgccggcggaagaattacggccagctggacatcttccccgccagagacacctaccaccccatgagcgagtaccccacataccacacccacggcagatacgtgccacccagctccaccgacagatccccctacgagaaagtgtctgccggcaacggcggcagctccctgagctacacaaatcctgccgtggccgctgcctccgccaacctgggatccggcacaatcctgtctgagggcgccaccaacttcagcctgctgaaactggccggcgacgtggaactgaaccctggccctggagctgccccggagccggagaggacccccgttggccagggatcgtgggcccatccgggacgcaccaggggaccatccgacaggggattctgtgtggtgtcaccggccaggccagcagaagaggcaaccagcctcgagggagcgttgtctggaaccagacattcccacccgtcggtgggccggcagcaccacgcgggaccaccgtccacttccagaccgccacggccatgggacaccccttgcccgcctgtgtatgccgagactaaacacttcctgtactcatccggagacaaggaacagcttcggccgtccttcctcctgtcgtcgctcagaccgagcctgaccggagcacgcagattggtggaaactatcttccttgggtcacgtccgtggatgccaggtaccccacggcgcctcccgcgcctcccacagagatactggcagatgcggcctctgttcctggaattgctgggaaaccacgctcagtgcccgtacggagtcctgctcaagactcactgccctctgagggcggcggtcactccggcggccggagtgtgcgcacgggagaagccccagggaagcgtggcagctccggaagaggaggacaccgatccgcgccgcctcgtgcaacttctgcgccagcactcctcgccctggcaagtctacgggttcgtccgcgcctgcctgcgccgcctggtgccgcctgggctctggggttcccggcataacgagcgccgcttcctgagaaatactaagaagtttatctcacttggaaaacatgccaagttgtcgctgcaagaactcacgtggaagatgtcagtccgcgattgcgcctggctgcgccgctcgccgggcgtcgggtgtgttccagctgcagaacaccgcctgagagaagaaattctggccaaatttctgcattggctgatgtcagtgtacgtggtcgagctgctgcgctcctttttctacgtcactgagactacctttcaaaagaaccgcctgttcttctaccgcaaatctgtgtggagcaagctgcagtcaatcggcattcgccagcatctgaagagggtgcagctgcgggaactttccgaggcagaagtccgccagcaccgggaggcccggccggcgcttctcacgtcgcgtctgagattcatcccaaagcccgacgggctgaggcctatcgtcaacatggattacgtcgtgggcgctcgcacctttcgccgtgaaaagcgggccgaacgcttgacctcacgggtgaaggccctcttctccgtgctgaactacgagagagcaagacggcctggcctgctgggagcttcggtgctgggactggacgatatccaccgggcttggcggacctttgttctccgggtgagagcccaagaccctccgccggaactgtacttcgtgaaggtggcgatcaccggagcctatgatactattccgcaagatcgactcaccgaagtcatcgcctcgatcatcaaaccgcagaacacttactgcgtcaggcggtacgccgtggtccagaaggccgcgcatggccacgtgagaaaggcgttcaagtcgcacgtgtccactctcaccgacctccagccttacatgaggcaattcgttgcgcatttgcaagagacttcgcccctgagagatgcggtggtcatcgagcagagctccagcctgaacgaagcgagcagcggtctgtttgacgtgttcctccgcttcatgtgtcatcacgcggtgcgaatcaggggaaaatcatacgtgcagtgccagggaatcccacaaggcagcattctgtcgactctcttgtgttccctttgctacggcgatatggaaaacaagctgttcgctgggatcagacgggacgggttgctgctcagactggtggacgacttcctgctggtgactccgcacctcactcacgccaaaacctttctccgcactctggtgaggggagtgccagaatacggctgtgtggtcaatctccggaaaactgtggtgaatttccctgtcgaggatgaggcactcggaggaaccgcatttgtccaaatgccagcacatggcctgttcccatggtgcggtctgctgctggacacccgaactcttgaagtgcagtccgactactccagctatgcccggacgagcatccgcgccagcctcactttcaatcgcggctttaaggccggacgaaacatgcgcagaaagcttttcggagtcctccggcttaaatgccattcgctctttctcgatctccaagtcaattcgctgcagaccgtgtgcacgaacatctacaagatcctgctgctccaagcctaccggttccacgcttgcgtgcttcagctgccgtttcaccaacaggtgtggaagaacccgaccttctttctgcgggtcattagcgatactgcctccctgtgttactcaatcctcaaggcaaagaacgccggaatgtcgctgggtgcgaaaggagccgcgggacctcttcctagcgaagcggtgcagtggctctgccaccaggctttcctcctgaagctgaccaggcacagagtgacctacgtcccgctgctgggctcgctgcgcactgcacagacccagctgtctagaaaactccccggcaccaccctgaccgctctggaagccgccgccaacccagcattgccgtcagatttcaagaccatcttggacggatccggccagtgcaccaattacgccctgctgaagctggccggcgacgtggaatctaaccctggccctgaatcgccaagcgcaccccctcatcggtggtgcatcccttggcaacgcctcctcctgaccgcctcactgctgactttctggaacccgccgaccaccgcaaagctgaccattgagagcactcccttcaacgtggctgaggggaaggaggtgctgctcctggtgcacaatctgccccagcacctgttcgggtactcctggtacaagggagaacgcgtggacgggaaccggcagatcataggctacgtcatcggaacccagcaggccacacccggtccagcgtacagcggccgggagattatctacccgaacgcctccctgctgatccaaaacatcatccagaacgacaccggtttctacactctgcacgtgattaagtcagatctggtcaacgaagaggccaccggccaattcagggtgtaccccgaactccctaagccgttcatcacctcgaacaacagcaacccggtcgaggatgaagatgcggtggccttgacgtgcgaacctgagatccagaacaccacctacttgtggtgggtgaacaatcagagcctgccagtctccccacgactccagctgtcgaacgacaacaggaccctgactttgctgtccgtgactcggaacgacgtgggcccttatgaatgcggtatccagaacaagctgtccgtggaccacagcgaccctgtgatcctgaacgtcctttacgggccggacgaccccaccatttccccgtcgtacacttactaccggccgggcgtgaacctgtccctgtcgtgccacgctgcctccaatccgccggcccagtactcctggctcatcgacggaaacatccagcagcacacccaagaactgttcatctccaacattaccgagaaaaactcgggactttacacctgtcaagccaacaattccgccagcggccactcccgcaccactgtcaaaactatcactgtgtccgccgaactcccgaagcccagcatcagctccaacaactcgaagcccgtggaggataaggacgctgtcgcgttcacctgtgaaccagaggcacagaataccacctacctttggtgggtcaacggacagtccctgcctgtctcaccgagactgcagctgtcaaacgggaataggactctgaccttgtttaacgtcacccggaacgacgcccgggcctacgtgtgcggcatccagaactccgtgagcgcaaaccggtctgacccagtgaccctggatgtgctgtacggccccgacactccgatcatttcaccccccgattcatcctacctgtccggcgctaacctcaacctctcatgccactccgcatccaaccccagcccgcaatattcgtggcgcattaacggaattcctcagcaacatacccaggtcctgttcattgcgaagatcacccctaacaacaacggaacctacgcctgctttgtgtcaaacctggccactggtagaaacaactccatcgtgaagtccattaccgtgtcggcgtccggaacttccccgggcctgagcgccggcgccaccgtgggaattatgatcggcgtgctcgtgggagtggccctgatctgacgcacctcgagctgatcataatcagccataccacatttgtagaggttttacttgctttaaaaaacctcccacacctccccctgaacctgaaacataaaatgaatgcaattgttgttgttaacttgtttattgcagcttataatggttacaaataaagcaatagcatcacaaatttcacaaataaagcatttttttcactgcattctagttgtggtttgtccaaactcatcaatgtatcttaccaggtgccgagcctgcgagtgcggagggaagcatgccaggttccagcccgtgtgtgtggatgtgacggaggacctgcgacccgatcatttggtgttgccctgcaccgggacggagttcggttccagcggggaagaatctgactagagtgagtagtgttctggggcgggggaggacctgcatgagggccagaataactgaaatctgtgcttttctgtgtgttgcagcagcatgagcggaagcggctcctttgagggaggggtattcagcccttatctgacggggcgtctcccctcctgggcgggagtgcgtcagaatgtgatgggatccacggtggacggccggcccgtgcagcccgcgaactcttcaaccctgacctatgcaaccctgagctcttcgtcgttggacgcagctgccgccgcagctgctgcatctgccgccagcgccgtgcgcggaatggccatgggcgccggctactacggcactctggtggccaactcgagttccaccaataatcccgccagcctgaacgaggagaagctgttgctgctgatggcccagctcgaggccttgacccagcgcctgggcgagctgacccagcaggtggctcagctgcaggagcagacgcgggccgcggttgccacggtgaaatccaaataaaaaatgaatcaataaataaacggagacggttgttgattttaacacagagtctgaatctttatttgatttttcgcgcgcggtaggccctggaccaccggtctcgatcattgagcacccggtggatcttttccaggacccggtagaggtgggcttggatgttgaggtacatgggcatgagcccgtcccgggggtggaggtagctccattgcagggcctcgtgctcgggggtggtgttgtaaatcacccagtcatagcaggggcgcagggcatggtgttgcacaatatctttgaggaggagactgatggccacgggcagccctttggtgtaggtgtttacaaatctgttgagctgggagggatgcatgcggggggagatgaggtgcatcttggcctggatcttgagattggcgatgttaccgcccagatcccgcctggggttcatgttgtgcaggaccaccagcacggtgtatccggtgcacttggggaatttatcatgcaacttggaagggaaggcgtgaaagaatttggcgacgcctttgtgcccgcccaggttttccatgcactcatccatgatgatggcgatgggcccgtgggcggcggcctgggcaaagacgtttcgggggtcggacacatcatagttgtggtcctgggtgaggtcatcataggccattttaatgaatttggggcggagggtgccggactgggggacaaaggtaccctcgatcccgggggcgtagttcccctcacagatctgcatctcccaggctttgagctcggagggggggatcatgtccacctgcggggcgataaagaacacggtttccggggcgggggagatgagctgggccgaaagcaagttccggagcagctgggacttgccgcagccggtggggccgtagatgaccccgatgaccggctgcaggtggtagttgagggagagacagctgccgtcctcccggaggaggggggccacctcgttcatcatctcgcgcacgtgcatgttctcgcgcaccagttccgccaggaggcgctctccccccagggataggagctcctggagcgaggcgaagtttttcagcggcttgagtccgtcggccatgggcattttggagagggtttgttgcaagagttccaggcggtcccagagctcggtgatgtgctctacggcatctcgatccagcagacctcctcgtttcgcgggttgggacggctgcgggagtagggcaccagacgatgggcgtccagcgcagccagggtccggtccttccagggtcgcagcgtccgcgtcagggtggtctccgtcacggtgaaggggtgcgcgccgggctgggcgcttgcgagggtgcgcttcaggctcatccggctggtcgaaaaccgctcccgatcggcgccctgcgcgtcggccaggtagcaattgaccatgagttcgtagttgagcgcctcggccgcgtggcctttggcgcggagcttacctttggaagtctgcccgcaggcgggacagaggagggacttgagggcgtagagcttgggggcgaggaagacggactcgggggcgtaggcgtccgcgccgcagtgggcgcagacggtctcgcactccacgagccaggtgaggtcgggctggtcggggtcaaaaaccagtttcccgccgttctttttgatgcgtttcttacctttggtctccatgagctcgtgtccccgctgggtgacaaagaggctgtccgtgtccccgtagaccgactttatgggccggtcctcgagcggtgtgccgcggtcctcctcgtagaggaaccccgcccactccgagacgaaagcccgggtccaggccagcacgaaggaggccacgtgggacgggtagcggtcgttgtccaccagcgggtccaccttttccagggtatgcaaacacatgtccccctcgtccacatccaggaaggtgattggcttgtaagtgtaggccacgtgaccgggggtcccggccgggggggtataaaagggtgcgggtccctgctcgtcctcactgtcttccggatcgctgtccaggagcgccagctgttggggtaggtattccctctcgaaggcgggcatgacctcggcactcaggttgtcagtttctagaaacgaggaggatttgatattgacggtgccggcggagatgcctttcaagagcccctcgtccatctggtcagaaaagacgatctttttgttgtcgagcttggtggcgaaggagccgtagagggcgttggagaggagcttggcgatggagcgcatggtctggtttttttccttgtcggcgcgctccttggcggcgatgttgagctgcacgtactcgcgcgccacgcacttccattcggggaagacggtggtcagctcgtcgggcacgattctgacctgccagccccgattatgcagggtgatgaggtccacactggtggccacctcgccgcgcaggggctcattagtccagcagaggcgtccgcccttgcgcgagcagaaggggggcagggggtccagcatgacctcgtcgggggggtcggcatcgatggtgaagatgccgggcaggaggtcggggtcaaagtagctgatggaagtggccagatcgtccagggcagcttgccattcgcgcacggccagcgcgcgctcgtagggactgaggggcgtgccccagggcatgggatgggtaagcgcggaggcgtacatgccgcagatgtcgtagacgtagaggggctcctcgaggatgccgatgtaggtggggtagcagcgccccccgcggatgctggcgcgcacgtagtcatacagctcgtgcgagggggcgaggagccccgggcccaggttggtgcgactgggcttttcggcgcggtagacgatctggcggaaaatggcatgcgagttggaggagatggtgggcctttggaagatgttgaagtgggcgtggggcagtccgaccgagtcgcggatgaagtgggcgtaggagtcttgcagcttggcgacgagctcggcggtgactaggacgtccagagcgcagtagtcgagggtctcctggatgatgtcatacttgagctgtcccttttgtttccacagctcgcggttgagaaggaactcttcgcggtccttccagtactcttcgagggggaacccgtcctgatctgcacggtaagagcctagcatgtagaactggttgacggccttgtaggcgcagcagcccttctccacggggagggcgtaggcctgggcggccttgcgcagggaggtgtgcgtgagggcgaaagtgtccctgaccatgaccttgaggaactggtgcttgaagtcgatatcgtcgcagcccccctgctcccagagctggaagtccgtgcgcttcttgtaggcggggttgggcaaagcgaaagtaacatcgttgaagaggatcttgcccgcgcggggcataaagttgcgagtgatgcggaaaggttggggcacctcggcccggttgttgatgacctgggcggcgagcacgatctcgtcgaagccgttgatgttgtggcccacgatgtagagttccacgaatcgcggacggcccttgacgtggggcagtttcttgagctcctcgtaggtgagctcgtcggggtcgctgagcccgtgctgctcgagcgcccagtcggcgagatgggggttggcgcggaggaaggaagtccagagatccacggccagggcggtttgcagacggtcccggtactgacggaactgctgcccgacggccattttttcgggggtgacgcagtagaaggtgcgggggtccccgtgccagcgatcccatttgagctggagggcgagatcgagggcgagctcgacgagccggtcgtccccggagagtttcatgaccagcatgaaggggacgagctgcttgccgaaggaccccatccaggtgtaggtttccacatcgtaggtgaggaagagcctttcggtgcgaggatgcgagccgatggggaagaactggatctcctgccaccaattggaggaatggctgttgatgtgatggaagtagaaatgccgacggcgcgccgaacactcgtgcttgtgtttatacaagcggccacagtgctcgcaacgctgcacgggatgcacgtgctgcacgagctgtacctgagttcctttgacgaggaatttcagtgggaagtggagtcgtggcgcctgcatctcgtgctgtactacgtcgtggtggtcggcctggccctcttctgcctcgatggtggtcatgctgacgagcccgcgcgggaggcaggtccagacctcggcgcgagcgggtcggagagcgaggacgagggcgcgcaggccggagctgtccagggtcctgagacgctgcggagtcaggtcagtgggcagcggcggcgcgcggttgacttgcaggagtttttccagggcgcgcgggaggtccagatggtacttgatctccaccgcgccattggtggcgacgtcgatggcttgcagggtcccgtgcccctggggtgtgaccaccgtcccccgtttcttcttgggcggctggggcgacgggggcggtgcctcttccatggttagaagcggcggcgaggacgcgcgccgggcggcaggggcggctcggggcccggaggcaggggcggcaggggcacgtcggcgccgcgcgcgggtaggttctggtactgcgcccggagaagactggcgtgagcgacgacgcgacggttgacgtcctggatctgacgcctctgggtgaaggccacgggacccgtgagtttgaacctgaaagagagttcgacagaatcaatctcggtatcgttgacggcggcctgccgcaggatctcttgcacgtcgcccgagttgtcctggtaggcgatctcggtcatgaactgctcgatctcctcctcttgaaggtctccgcggccggcgcgctccacggtggccgcgaggtcgttggagatgcggcccatgagctgcgagaaggcgttcatgcccgcctcgttccagacgcggctgtagaccacgacgccctcgggatcgcgggcgcgcatgaccacctgggcgaggttgagctccacgtggcgcgtgaagaccgcgtagttgcagaggcgctggtagaggtagttgagcgtggtggcgatgtgctcggtgacgaagaaatacatgatccagcggcggagcggcatctcgctgacgtcgcccagcgcctccaaacgttccatggcctcgtaaaagtccacggcgaagttgaaaaactgggagttgcgcgccgagacggtcaactcctcctccagaagacggatgagctcggcgatggtggcgcgcacctcgcgctcgaaggcccccgggagttcctccacttcctcttcttcctcctccactaacatctcttctacttcctcctcaggcggcagtggtggcgggggagggggcctgcgtcgccggcggcgcacgggcagacggtcgatgaagcgctcgatggtctcgccgcgccggcgtcgcatggtctcggtgacggcgcgcccgtcctcgcggggccgcagcgtgaagacgccgccgcgcatctccaggtggccgggggggtccccgttgggcagggagagggcgctgacgatgcatcttatcaattgccccgtagggactccgcgcaaggacctgagcgtctcgagatccacgggatctgaaaaccgctgaacgaaggcttcgagccagtcgcagtcgcaaggtaggctgagcacggtttcttctggcgggtcatgttggttgggagcggggcgggcgatgctgctggtgatgaagttgaaataggcggttctgagacggcggatggtggcgaggagcaccaggtctttgggcccggcttgctggatgcgcagacggtcggccatgccccaggcgtggtcctgacacctggccaggtccttgtagtagtcctgcatgagccgctccacgggcacctcctcctcgcccgcgcggccgtgcatgcgcgtgagcccgaagccgcgctggggctggacgagcgccaggtcggcgacgacgcgctcggcgaggatggcttgctggatctgggtgagggtggtctggaagtcatcaaagtcgacgaagcggtggtaggctccggtgttgatggtgtaggagcagttggccatgacggaccagttgacggtctggtggcccggacgcacgagctcgtggtacttgaggcgcgagtaggcgcgcgtgtcgaagatgtagtcgttgcaggtgcgcaccaggtactggtagccgatgaggaagtgcggcggcggctggcggtagagcggccatcgctcggtggcgggggcgccgggcgcgaggtcctcgagcatggtgcggtggtagccgtagatgtacctggacatccaggtgatgccggcggcggtggtggaggcgcgcgggaactcgcggacgcggttccagatgttgcgcagcggcaggaagtagttcatggtgggcacggtctggcccgtgaggcgcgcgcagtcgtggatgctctatacgggcaaaaacgaaagcggtcagcggctcgactccgtggcctggaggctaagcgaacgggttgggctgcgcgtgtaccccggttcgaatctcgaatcaggctggagccgcagctaacgtggtattggcactcccgtctcgacccaagcctgcaccaaccctccaggatacggaggcgggtcgttttgcaacttttttttggaggccggatgagactagtaagcgcggaaagcggccgaccgcgatggctcgctgccgtagtctggagaagaatcgccagggttgcgttgcggtgtgccccggttcgaggccggccggattccgcggctaacgagggcgtggctgccccgtcgtttccaagaccccatagccagccgacttctccagttacggagcgagcccctcttttgttttgtttgtttttgccagatgcatcccgtactgcggcagatgcgcccccaccaccctccaccgcaacaacagccccctccacagccggcgcttctgcccccgccccagcagcaacttccagccacgaccgccgcggccgccgtgagcggggctggacagagttatgatcaccagctggccttggaagagggcgaggggctggcgcgcctgggggcgtcgtcgccggagcggcacccgcgcgtgcagatgaaaagggacgctcgcgaggcctacgtgcccaagcagaacctgttcagagacaggagcggcgaggagcccgaggagatgcgcgcggcccggttccacgcggggcgggagctgcggcgcggcctggaccgaaagagggtgctgagggacgaggatttcgaggcggacgagctgacggggatcagccccgcgcgcgcgcacgtggccgcggccaacctggtcacggcgtacgagcagaccgtgaaggaggagagcaacttccaaaaatccttcaacaaccacgtgcgcaccctgatcgcgcgcgaggaggtgaccctgggcctgatgcacctgtgggacctgctggaggccatcgtgcagaaccccaccagcaagccgctgacggcgcagctgttcctggtggtgcagcatagtcgggacaacgaagcgttcagggaggcgctgctgaatatcaccgagcccgagggccgctggctcctggacctggtgaacattctgcagagcatcgtggtgcaggagcgcgggctgccgctgtccgagaagctggcggccatcaacttctcggtgctgagtttgggcaagtactacgctaggaagatctacaagaccccgtacgtgcccatagacaaggaggtgaagatcgacgggttttacatgcgcatgaccctgaaagtgctgaccctgagcgacgatctgggggtgtaccgcaacgacaggatgcaccgtgcggtgagcgccagcaggcggcgcgagctgagcgaccaggagctgatgcatagtctgcagcgggccctgaccggggccgggaccgagggggagagctactttgacatgggcgcggacctgcactggcagcccagccgccgggccttggaggcggcggcaggaccctacgtagaagaggtggacgatgaggtggacgaggagggcgagtacctggaagactgatggcgcgaccgtatttttgctagatgcaacaacaacagccacctcctgatcccgcgatgcgggcggcgctgcagagccagccgtccggcattaactcctcggacgattggacccaggccatgcaacgcatcatggcgctgacgacccgcaaccccgaagcctttagacagcagccccaggccaaccggctctcggccatcctggaggccgtggtgccctcgcgctccaaccccacgcacgagaaggtcctggccatcgtgaacgcgctggtggagaacaaggccatccgcggcgacgaggccggcctggtgtacaacgcgctgctggagcgcgtggcccgctacaacagcaccaacgtgcagaccaacctggaccgcatggtgaccgacgtgcgcgaggccgtggcccagcgcgagcggttccaccgcgagtccaacctgggatccatggtggcgctgaacgccttcctcagcacccagcccgccaacgtgccccggggccaggaggactacaccaacttcatcagcgccctgcgcctgatggtgaccgaggtgccccagagcgaggtgtaccagtccgggccggactacttcttccagaccagtcgccagggcttgcagaccgtgaacctgagccaggctttcaagaacttgcagggcctgtggggcgtgcaggccccggtcggggaccgcgcgacggtgtcgagcctgctgacgccgaactcgcgcctgctgctgctgctggtggcccccttcacggacagcggcagcatcaaccgcaactcgtacctgggctacctgattaacctgtaccgcgaggccatcggccaggcgcacgtggacgagcagacctaccaggagatcacccacgtgagccgcgccctgggccaggacgacccgggcaacctggaagccaccctgaactttttgctgaccaaccggtcgcagaagatcccgccccagtacgcgctcagcaccgaggaggagcgcatcctgcgttacgtgcagcagagcgtgggcctgttcctgatgcaggagggggccacccccagcgccgcgctcgacatgaccgcgcgcaacatggagcccagcatgtacgccagcaaccgcccgttcatcaataaactgatggactacttgcatcgggcggccgccatgaactctgactatttcaccaacgccatcctgaatccccactggctcccgccgccggggttctacacgggcgagtacgacatgcccgaccccaatgacgggttcctgtgggacgatgtggacagcagcgtgttctccccccgaccgggtgctaacgagcgccccttgtggaagaaggaaggcagcgaccgacgcccgtcctcggcgctgtccggccgcgagggtgctgccgcggcggtgcccgaggccgccagtcctttcccgagcttgcccttctcgctgaacagtatccgcagcagcgagctgggcaggatcacgcgcccgcgcttgctgggcgaagaggagtacttgaatgactcgctgttgagacccgagcgggagaagaacttccccaataacgggatagaaagcctggtggacaagatgagccgctggaagacgtatgcgcaggagcacagggacgatccccgggcgtcgcagggggccacgagccggggcagcgccgcccgtaaacgccggtggcacgacaggcagcggggacagatgtgggacgatgaggactccgccgacgacagcagcgtgttggacttgggtgggagtggtaacccgttcgctcacctgcgcccccgtatcgggcgcatgatgtaagagaaaccgaaaataaatgatactcaccaaggccatggcgaccagcgtgcgttcgtttcttctctgttgttgttgtatctagtatgatgaggcgtgcgtacccggagggtcctcctccctcgtacgagagcgtgatgcagcaggcgatggcggcggcggcgatgcagcccccgctggaggctccttacgtgcccccgcggtacctggcgcctacggaggggcggaacagcattcgttactcggagctggcacccttgtacgataccacccggttgtacctggtggacaacaagtcggcggacatcgcctcgctgaactaccagaacgaccacagcaacttcctgaccaccgtggtgcagaacaatgacttcacccccacggaggccagcacccagaccatcaactttgacgagcgctcgcggtggggcggccagctgaaaaccatcatgcacaccaacatgcccaacgtgaacgagttcatgtacagcaacaagttcaaggcgcgggtgatggtctcccgcaagacccccaatggggtgacagtgacagaggattatgatggtagtcaggatgagctgaagtatgaatgggtggaatttgagctgcccgaaggcaacttctcggtgaccatgaccatcgacctgatgaacaacgccatcatcgacaattacttggcggtggggcggcagaacggggtgctggagagcgacatcggcgtgaagttcgacactaggaacttcaggctgggctgggaccccgtgaccgagctggtcatgcccggggtgtacaccaacgaggctttccatcccgatattgtcttgctgcccggctgcggggtggacttcaccgagagccgcctcagcaacctgctgggcattcgcaagaggcagcccttccaggaaggcttccagatcatgtacgaggatctggaggggggcaacatccccgcgctcctggatgtcgacgcctatgagaaaagcaaggaggatgcagcagctgaagcaactgcagccgtagctaccgcctctaccgaggtcaggggcgataattttgcaagcgccgcagcagtggcagcggccgaggcggctgaaaccgaaagtaagatagtcattcagccggtggagaaggatagcaagaacaggagctacaacgtactaccggacaagataaacaccgcctaccgcagctggtacctagcctacaactatggcgaccccgagaagggcgtgcgctcctggacgctgctcaccacctcggacgtcacctgcggcgtggagcaagtctactggtcgctgcccgacatgatgcaagacccggtcaccttccgctccacgcgtcaagttagcaactacccggtggtgggcgccgagctcctgcccgtctactccaagagcttcttcaacgagcaggccgtctactcgcagcagctgcgcgccttcacctcgcttacgcacgtcttcaaccgcttccccgagaaccagatcctcgtccgcccgcccgcgcccaccattaccaccgtcagtgaaaacgttcctgctctcacagatcacgggaccctgccgctgcgcagcagtatccggggagtccagcgcgtgaccgttactgacgccagacgccgcacctgcccctacgtctacaaggccctgggcatagtcgcgccgcgcgtcctctcgagccgcaccttctaaatgtccattctcatctcgcccagtaataacaccggttggggcctgcgcgcgcccagcaagatgtacggaggcgctcgccaacgctccacgcaacaccccgtgcgcgtgcgcgggcacttccgcgctccctggggcgccctcaagggccgcgtgcggtcgcgcaccaccgtcgacgacgtgatcgaccaggtggtggccgacgcgcgcaactacacccccgccgccgcgcccgtctccaccgtggacgccgtcatcgacagcgtggtggccgacgcgcgccggtacgcccgcgccaagagccggcggcggcgcatcgcccggcggcaccggagcacccccgccatgcgcgcggcgcgagccttgctgcgcagggccaggcgcacgggacgcagggccatgctcagggcggccagacgcgcggcttcaggcgccagcgccggcaggacccggagacgcgcggccacggcggcggcagcggccatcgccagcatgtcccgcccgcggcgagggaacgtgtactgggtgcgcgacgccgccaccggtgtgcgcgtgcccgtgcgcacccgcccccctcgcacttgaagatgttcacttcgcgatgttgatgtgtcccagcggcgaggaggatgtccaagcgcaaattcaaggaagagatgctccaggtcatcgcgcctgagatctacggccctgcggtggtgaaggaggaaagaaagccccgcaaaatcaagcgggtcaaaaaggacaaaaaggaagaagaaagtgatgtggacggattggtggagtttgtgcgcgagttcgccccccggcggcgcgtgcagtggcgcgggcggaaggtgcaaccggtgctgagacccggcaccaccgtggtcttcacgcccggcgagcgctccggcaccgcttccaagcgctcctacgacgaggtgtacggggatgatgatattctggagcaggcggccgagcgcctgggcgagtttgcttacggcaagcgcagccgttccgcaccgaaggaagaggcggtgtccatcccgctggaccacggcaaccccacgccgagcctcaagcccgtgaccttgcagcaggtgctgccgaccgcggcgccgcgccgggggttcaagcgcgagggcgaggatctgtaccccaccatgcagctgatggtgcccaagcgccagaagctggaagacgtgctggagaccatgaaggtggacccggacgtgcagcccgaggtcaaggtgcggcccatcaagcaggtggccccgggcctgggcgtgcagaccgtggacatcaagattcccacggagcccatggaaacgcagaccgagcccatgatcaagcccagcaccagcaccatggaggtgcagacggatccctggatgccatcggctcctagtcgaagaccccggcgcaagtacggcgcggccagcctgctgatgcccaactacgcgctgcatccttccatcatccccacgccgggctaccgcggcacgcgcttctaccgcggtcataccagcagccgccgccgcaagaccaccactcgccgccgccgtcgccgcaccgccgctgcaaccacccctgccgccctggtgcggagagtgtaccgccgcggccgcgcacctctgaccctgccgcgcgcgcgctaccacccgagcatcgccatttaaactttcgcctgctttgcagatcaatggccctcacatgccgccttcgcgttcccattacgggctaccgaggaagaaaaccgcgccgtagaaggctggcggggaacgggatgcgtcgccaccaccaccggcggcggcgcgccatcagcaagcggttggggggaggcttcctgcccgcgctgatccccatcatcgccgcggcgatcggggcgatccccggcattgcttccgtggcggtgcaggcctctcagcgccactgagacacacttggaaacatcttgtaataaaccaatggactctgacgctcctggtcctgtgatgtgttttcgtagacagatggaagacatcaatttttcgtccctggctccgcgacacggcacgcggccgttcatgggcacctggagcgacatcggcaccagccaactgaacgggggcgccttcaattggagcagtctctggagcgggcttaagaatttcgggtccacgcttaaaacctatggcagcaaggcgtggaacagcaccacagggcaggcgctgagggataagctgaaagagcagaacttccagcagaaggtggtcgatgggctcgcctcgggcatcaacggggtggtggacctggccaaccaggccgtgcagcggcagatcaacagccgcctggacccggtgccgcccgccggctccgtggagatgccgcaggtggaggaggagctgcctcccctggacaagcggggcgagaagcgaccccgccccgatgcggaggagacgctgctgacgcacacggacgagccgcccccgtacgaggaggcggtgaaactgggtctgcccaccacgcggcccatcgcgcccctggccaccggggtgctgaaacccgaaaagcccgcgaccctggacttgcctcctccccagccttcccgcccctctacagtggctaagcccctgccgccggtggccgtggcccgcgcgcgacccgggggcaccgcccgccctcatgcgaactggcagagcactctgaacagcatcgtgggtctgggagtgcagagtgtgaagcgccgccgctgctattaaacctaccgtagcgcttaacttgcttgtctgtgtgtgtatgtattatgtcgccgccgccgctgtccaccagaaggaggagtgaagaggcgcgtcgccgagttgcaagatggccaccccatcgatgctgccccagtgggcgtacatgcacatcgccggacaggacgcttcggagtacctgagtccgggtctggtgcagtttgcccgcgccacagacacctacttcagtctggggaacaagtttaggaaccccacggtggcgcccacgcacgatgtgaccaccgaccgcagccagcggctgacgctgcgcttcgtgcccgtggaccgcgaggacaacacctactcgtacaaagtgcgctacacgctggccgtgggcgacaaccgcgtgctggacatggccagcacctactttgacatccgcggcgtgctggatcggggccctagcttcaaaccctactccggcaccgcctacaacagtctggcccccaagggagcacccaacacttgtcagtggacatataaagccgatggtgaaactgccacagaaaaaacctatacatatggaaatgcacccgtgcagggcattaacatcacaaaagatggtattcaacttggaactgacaccgatgatcagccaatctacgcagataaaacctatcagcctgaacctcaagtgggtgatgctgaatggcatgacatcactggtactgatgaaaagtatggaggcagagctcttaagcctgataccaaaatgaagccttgttatggttcttttgccaagcctactaataaagaaggaggtcaggcaaatgtgaaaacaggaacaggcactactaaagaatatgacatagacatggctttctttgacaacagaagtgcggctgctgctggcctagctccagaaattgttttgtatactgaaaatgtggatttggaaactccagatacccatattgtatacaaagcaggcacagatgacagcagctcttctattaatttgggtcagcaagccatgcccaacagacctaactacattggtttcagagacaactttatcgggctcatgtactacaacagcactggcaatatgggggtgctggccggtcaggcttctcagctgaatgctgtggttgacttgcaagacagaaacaccgagctgtcctaccagctcttgcttgactctctgggtgacagaacccggtatttcagtatgtggaatcaggcggtggacagctatgatcctgatgtgcgcattattgaaaatcatggtgtggaggatgaacttcccaactattgtttccctctggatgctgttggcagaacagatacttatcagggaattaaggctaatggaactgatcaaaccacatggaccaaagatgacagtgtcaatgatgctaatgagataggcaagggtaatccattcgccatggaaatcaacatccaagccaacctgtggaggaacttcctctacgccaacgtggccctgtacctgcccgactcttacaagtacacgccggccaatgttaccctgcccaccaacaccaacacctacgattacatgaacggccgggtggtggcgccctcgctggtggactcctacatcaacatcggggcgcgctggtcgctggatcccatggacaacgtgaaccccttcaaccaccaccgcaatgcggggctgcgctaccgctccatgctcctgggcaacgggcgctacgtgcccttccacatccaggtgccccagaaatttttcgccatcaagagcctcctgctcctgcccgggtcctacacctacgagtggaacttccgcaaggacgtcaacatgatcctgcagagctccctcggcaacgacctgcgcacggacggggcctccatctccttcaccagcatcaacctctacgccaccttcttccccatggcgcacaacacggcctccacgctcgaggccatgctgcgcaacgacaccaacgaccagtccttcaacgactacctctcggcggccaacatgctctaccccatcccggccaacgccaccaacgtgcccatctccatcccctcgcgcaactgggccgccttccgcggctggtccttcacgcgtctcaagaccaaggagacgccctcgctgggctccgggttcgacccctacttcgtctactcgggctccatcccctacctcgacggcaccttctacctcaaccacaccttcaagaaggtctccatcaccttcgactcctccgtcagctggcccggcaacgaccggctcctgacgcccaacgagttcgaaatcaagcgcaccgtcgacggcgagggctacaacgtggcccagtgcaacatgaccaaggactggttcctggtccagatgctggcccactacaacatcggctaccagggcttctacgtgcccgagggctacaaggaccgcatgtactccttcttccgcaacttccagcccatgagccgccaggtggtggacgaggtcaactacaaggactaccaggccgtcaccctggcctaccagcacaacaactcgggcttcgtcggctacctcgcgcccaccatgcgccagggccagccctaccccgccaactacccctacccgctcatcggcaagagcgccgtcaccagcgtcacccagaaaaagttcctctgcgacagggtcatgtggcgcatccccttctccagcaacttcatgtccatgggcgcgctcaccgacctcggccagaacatgctctatgccaactccgcccacgcgctagacatgaatttcgaagtcgaccccatggatgagtccacccttctctatgttgtcttcgaagtcttcgacgtcgtccgagtgcaccagccccaccgcggcgtcatcgaggccgtctacctgcgcacccccttctcggccggtaacgccaccacctaagctcttgcttcttgcaagccatggccgcgggctccggcgagcaggagctcagggccatcatccgcgacctgggctgcgggccctacttcctgggcaccttcgataagcgcttcccgggattcatggccccgcacaagctggcctgcgccatcgtcaacacggccggccgcgagaccgggggcgagcactggctggccttcgcctggaacccgcgctcgaacacctgctacctcttcgaccccttcgggttctcggacgagcgcctcaagcagatctaccagttcgagtacgagggcctgctgcgccgcagcgccctggccaccgaggaccgctgcgtcaccctggaaaagtccacccagaccgtgcagggtccgcgctcggccgcctgcgggctcttctgctgcatgttcctgcacgccttcgtgcactggcccgaccgccccatggacaagaaccccaccatgaacttgctgacgggggtgcccaacggcatgctccagtcgccccaggtggaacccaccctgcgccgcaaccaggaggcgctctaccgcttcctcaactcccactccgcctactttcgctcccaccgcgcgcgcatcgagaaggccaccgccttcgaccgcatgaatcaagacatgtaaaccgtgtgtgtatgttaaatgtctttaataaacagcactttcatgttacacatgcatctgagatgatttatttagaaatcgaaagggttctgccgggtctcggcatggcccgcgggcagggacacgttgcggaactggtacttggccagccacttgaactcggggatcagcagtttgggcagcggggtgtcggggaaggagtcggtccacagcttccgcgtcagttgcagggcgcccagcaggtcgggcgcggagatcttgaaatcgcagttgggacccgcgttctgcgcgcgggagttgcggtacacggggttgcagcactggaacaccatcagggccgggtgcttcacgctcgccagcaccgtcgcgtcggtgatgctctccacgtcgaggtcctcggcgttggccatcccgaagggggtcatcttgcaggtctgccttcccatggtgggcacgcacccgggcttgtggttgcaatcgcagtgcagggggatcagcatcatctgggcctggtcggcgttcatccccgggtacatggccttcatgaaagcctccaattgcctgaacgcctgctgggccttggctccctcggtgaagaagaccccgcaggacttgctagagaactggttggtggcgcacccggcgtcgtgcacgcagcagcgcgcgtcgttgttggccagctgcaccacgctgcgcccccagcggttctgggtgatcttggcccggtcggggttctccttcagcgcgcgctgcccgttctcgctcgccacatccatctcgatcatgtgctccttctggatcatggtggtcccgtgcaggcaccgcagcttgccctcggcctcggtgcacccgtgcagccacagcgcgcacccggtgcactcccagttcttgtgggcgatctgggaatgcgcgtgcacgaagccctgcaggaagcggcccatcatggtggtcagggtcttgttgctagtgaaggtcagcggaatgccgcggtgctcctcgttgatgtacaggtggcagatgcggcggtacacctcgccctgctcgggcatcagctggaagttggctttcaggtcggtctccacgcggtagcggtccatcagcatagtcatgatttccatacccttctcccaggccgagacgatgggcaggctcatagggttcttcaccatcatcttagcgctagcagccgcggccagggggtcgctctcgtccagggtctcaaagctccgcttgccgtccttctcggtgatccgcaccggggggtagctgaagcccacggccgccagctcctcctcggcctgtctttcgtcctcgctgtcctggctgacgtcctgcaggaccacatgcttggtcttgcggggtttcttcttgggcggcagcggcggcggagatgttggagatggcgagggggagcgcgagttctcgctcaccactactatctcttcctcttcttggtccgaggccacgcggcggtaggtatgtctcttcgggggcagaggcggaggcgacgggctctcgccgccgcgacttggcggatggctggcagagccccttccgcgttcgggggtgcgctcccggcggcgctctgactgacttcctccgcggccggccattgtgttctcctagggaggaacaacaagcatggagactcagccatcgccaacctcgccatctgcccccaccgccgacgagaagcagcagcagcagaatgaaagcttaaccgccccgccgcccagccccgccacctccgacgcggccgtcccagacatgcaagagatggaggaatccatcgagattgacctgggctatgtgacgcccgcggagcacgaggaggagctggcagtgcgcttttcacaagaagagatacaccaagaacagccagagcaggaagcagagaatgagcagagtcaggctgggctcgagcatgacggcgactacctccacctgagcgggggggaggacgcgctcatcaagcatctggcccggcaggccaccatcgtcaaggatgcgctgctcgaccgcaccgaggtgcccctcagcgtggaggagctcagccgcgcctacgagttgaacctcttctcgccgcgcgtgccccccaagcgccagcccaatggcacctgcgagcccaacccgcgcctcaacttctacccggtcttcgcggtgcccgaggccctggccacctaccacatctttttcaagaaccaaaagatccccgtctcctgccgcgccaaccgcacccgcgccgacgcccttttcaacctgggtcccggcgcccgcctacctgatatcgcctccttggaagaggttcccaagatcttcgagggtctgggcagcgacgagactcgggccgcgaacgctctgcaaggagaaggaggagagcatgagcaccacagcgccctggtcgagttggaaggcgacaacgcgcggctggcggtgctcaaacgcacggtcgagctgacccatttcgcctacccggctctgaacctgccccccaaagtcatgagcgcggtcatggaccaggtgctcatcaagcgcgcgtcgcccatctccgaggacgagggcatgcaagactccgaggagggcaagcccgtggtcagcgacgagcagctggcccggtggctgggtcctaatgctagtccccagagtttggaagagcggcgcaaactcatgatggccgtggtcctggtgaccgtggagctggagtgcctgcgccgcttcttcgccgacgcggagaccctgcgcaaggtcgaggagaacctgcactacctcttcaggcacgggttcgtgcgccaggcctgcaagatctccaacgtggagctgaccaacctggtctcctacatgggcatcttgcacgagaaccgcctggggcagaacgtgctgcacaccaccctgcgcggggaggcccggcgcgactacatccgcgactgcgtctacctctacctctgccacacctggcagacgggcatgggcgtgtggcagcagtgtctggaggagcagaacctgaaagagctctgcaagctcctgcagaagaacctcaagggtctgtggaccgggttcgacgagcgcaccaccgcctcggacctggccgacctcattttccccgagcgcctcaggctgacgctgcgcaacggcctgcccgactttatgagccaaagcatgttgcaaaactttcgctctttcatcctcgaacgctccggaatcctgcccgccacctgctccgcgctgccctcggacttcgtgccgctgaccttccgcgagtgccccccgccgctgtggagccactgctacctgctgcgcctggccaactacctggcctaccactcggacgtgatcgaggacgtcagcggcgagggcctgctcgagtgccactgccgctgcaacctctgcacgccgcaccgctccctggcctgcaacccccagctgctgagcgagacccagatcatcggcaccttcgagttgcaagggcccagcgaaggcgagggttcagccgccaaggggggtctgaaactcaccccggggctgtggacctcggcctacttgcgcaagttcgtgcccgaggactaccatcccttcgagatcaggttctacgaggaccaatcccatccgcccaaggccgagctgtcggcctgcgtcatcacccagggggcgatcctggcccaattgcaagccatccagaaatcccgccaagaattcttgctgaaaaagggccgcggggtctacctcgacccccagaccggtgaggagctcaaccccggcttcccccaggatgccccgaggaaacaagaagctgaaagtggagctgccgcccgtggaggatttggaggaagactgggagaacagcagtcaggcagaggaggaggagatggaggaagactgggacagcactcaggcagaggaggacagcctgcaagacagtctggaggaagacgaggaggaggcagaggaggaggtggaagaagcagccgccgccagaccgtcgtcctcggcgggggagaaagcaagcagcacggataccatctccgctccgggtcggggtcccgctcgaccacacagtagatgggacgagaccggacgattcccgaaccccaccacccagaccggtaagaaggagcggcagggatacaagtcctggcgggggcacaaaaacgccatcgtctcctgcttgcaggcctgcgggggcaacatctccttcacccggcgctacctgctcttccaccgcggggtgaactttccccgcaacatcttgcattactaccgtcacctccacagcccctactacttccaagaagaggcagcagcagcagaaaaagaccagcagaaaaccagcagctagaaaatccacagcggcggcagcaggtggactgaggatcgcggcgaacgagccggcgcaaacccgggagctgaggaaccggatctttcccaccctctatgccatcttccagcagagtcgggggcaggagcaggaactgaaagtcaagaaccgttctctgcgctcgctcacccgcagttgtctgtatcacaagagcgaagaccaacttcagcgcactctcgaggacgccgaggctctcttcaacaagtactgcgcgctcactcttaaagagtagcccgcgcccgcccagtcgcagaaaaaggcgggaattacgtcacctgtgcccttcgccctagccgcctccacccatcatcatgagcaaagagattcccacgccttacatgtggagctaccagccccagatgggcctggccgccggtgccgcccaggactactccacccgcatgaattggctcagcgccgggcccgcgatgatctcacgggtgaatgacatccgcgcccaccgaaaccagatactcctagaacagtcagcgctcaccgccacgccccgcaatcacctcaatccgcgtaattggcccgccgccctggtgtaccaggaaattccccagcccacgaccgtactacttccgcgagacgcccaggccgaagtccagctgactaactcaggtgtccagctggcgggcggcgccaccctgtgtcgtcaccgccccgctcagggtataaagcggctggtgatccggggcagaggcacacagctcaacgacgaggtggtgagctcttcgctgggtctgcgacctgacggagtcttccaactcgccggatcggggagatcttccttcacgcctcgtcaggccgtcctgactttggagagttcgtcctcgcagccccgctcgggtggcatcggcactctccagttcgtggaggagttcactccctcggtctacttcaaccccttctccggctcccccggccactacccggacgagttcatcccgaacttcgacgccatcagcgagtcggtggacggctacgattgaatgtcccatggtggcgcagctgacctagctcggcttcgacacctggaccactgccgccgcttccgctgcttcgctcgggatctcgccgagtttgcctactttgagctgcccgaggagcaccctcagggcccggcccacggagtgcggatcgtcgtcgaagggggcctcgactcccacctgcttcggatcttcagccagcgtccgatcctggtcgagcgcgagcaaggacagacccttctgactctgtactgcatctgcaaccaccccggcctgcatgaaagtctttgttgtctgctgtgtactgagtataataaaagctgagatcagcgactactccggacttccgtgtgtttaaactcacccccttatccagtgaaataaagatcatattgatgatgattttacagaaataaaaaataatcatttgatttgaaataaagatacaatcatattgatgatttgagtttaacaaaaaaataaagaatcacttacttgaaatctgataccaggtctctgtccatgttttctgccaacaccacttcactcccctcttcccagctctggtactgcaggccccggcgggctgcaaacttcctccacacgctgaaggggatgtcaaattcctcctgtccctcaatcttcattttatcttctatcagatgtccaaaaagcgcgtccgggtggatgatgacttcgaccccgtctacccctacgatgcagacaacgcaccgaccgtgcccttcatcaacccccccttcgtctcttcagatggattccaagagaagcccctgggggtgttgtccctgcgactggccgaccccgtcaccaccaagaacggggaaatcaccctcaagctgggagagggggtggacctcgattcctcgggaaaactcatctccaacacggccaccaaggccgccgcccctctcagtttttccaacaacaccatttcccttaacatggatcaccccttttacactaaagatggaaaattatccttacaagtttctccaccattaaatatactgagaacaagcattctaaacacactagctttaggttttggatcaggtttaggactccgtggctctgccttggcagtacagttagtctctccacttacatttgatactgatggaaacataaagcttaccttagacagaggtttgcatgttacaacaggagatgcaattgaaagcaacataagctgggctaaaggtttaaaatttgaagatggagccatagcaaccaacattggaaatgggttagagtttggaagcagtagtacagaaacaggtgttgatgatgcttacccaatccaagttaaacttggatctggccttagctttgacagtacaggagccataatggctggtaacaaagaagacgataaactcactttgtggacaacacctgatccatcaccaaactgtcaaatactcgcagaaaatgatgcaaaactaacactttgcttgactaaatgtggtagtcaaatactggccactgtgtcagtcttagttgtaggaagtggaaacctaaaccccattactggcaccgtaagcagtgctcaggtgtttctacgttttgatgcaaacggtgttcttttaacagaacattctacactaaaaaaatactgggggtataggcagggagatagcatagatggcactccatataccaatgctgtaggattcatgcccaatttaaaagcttatccaaagtcacaaagttctactactaaaaataatatagtagggcaagtatacatgaatggagatgtttcaaaacctatgcttctcactataaccctcaatggtactgatgacagcaacagtacatattcaatgtcattttcatacacctggactaatggaagctatgttggagcaacatttggggctaactcttataccttctcatacatcgcccaagaatgaacactgtatcccaccctgcatgccaacccttcccaccccactctgtggaacaaactctgaaacacaaaataaaataaagttcaagtgttttattgattcaacagttttacaggattcgagcagttatttttcctccaccctcccaggacatggaatacaccaccctctccccccgcacagccttgaacatctgaatgccattggtgatggacatgcttttggtctccacgttccacacagtttcagagcgagccagtctcgggtcggtcagggagatgaaaccctccgggcactcccgcatctgcacctcacagctcaacagctgaggattgtcctcggtggtcgggatcacggttatctggaagaagcagaagagcggcggtgggaatcatagtccgcgaacgggatcggccggtggtgtcgcatcaggccccgcagcagtcgctgccgccgccgctccgtcaagctgctgctcagggggtccgggtccagggactccctcagcatgatgcccacggccctcagcatcagtcgtctggtgcggcgggcgcagcagcgcatgcggatctcgctcaggtcgctgcagtacgtgcaacacagaaccaccaggttgttcaacagtccatagttcaacacgctccagccgaaactcatcgcgggaaggatgctacccacgtggccgtcgtaccagatcctcaggtaaatcaagtggtgccccctccagaacacgctgcccacgtacatgatctccttgggcatgtggcggttcaccacctcccggtaccacatcaccctctggttgaacatgcagccccggatgatcctgcggaaccacagggccagcaccgccccgcccgccatgcagcgaagagaccccgggtcccggcaatggcaatggaggacccaccgctcgtacccgtggatcatctgggagctgaacaagtctatgttggcacagcacaggcatatgctcatgcatctcttcagcactctcaactcctcgggggtcaaaaccatatcccagggcacggggaactcttgcaggacagcgaaccccgcagaacagggcaatcctcgcacagaacttacattgtgcatggacagggtatcgcaatcaggcagcaccgggtgatcctccaccagagaagcgcgggtctcggtctcctcacagcgtggtaagggggccggccgatacgggtgatggcgggacgcggctgatcgtgttcgcgaccgtgtcatgatgcagttgctttcggacattttcgtacttgctgtagcagaacctggtccgggcgctgcacaccgatcgccggcggcggtctcggcgcttggaacgctcggtgttgaaattgtaaaacagccactctctcagaccgtgcagcagatctagggcctcaggagtgatgaagatcccatcatgcctgatggctctgatcacatcgaccaccgtggaatgggccagacccagccagatgatgcaattttgttgggtttcggtgacggcgggggagggaagaacaggaagaaccatgattaacttttaatccaaacggtctcggagtacttcaaaatgaagatcgcggagatggcacctctcgcccccgctgtgttggtggaaaataacagccaggtcaaaggtgatacggttctcgagatgttccacggtggcttccagcaaagcctccacgcgcacatccagaaacaagacaatagcgaaagcgggagggttctctaattcctcaatcatcatgttacactcctgcaccatccccagataattttcatttttccagccttgaatgattcgaactagttcctgaggtaaatccaagccagccatgataaagagctcgcgcagagcgccctccaccggcattcttaagcacaccctcataattccaagatattctgctcctggttcacctgcagcagattgacaagcggaatatcaaaatctctgccgcgatccctgagctcctccctcagcaataactgtaagtactctttcatatcctctccgaaatttttagccataggaccaccaggaataagattagggcaagccacagtacagataaaccgaagtcctccccagtgagcattgccaaatgcaagactgctataagcatgctggctagacccggtgatatcttccagataactggacagaaaatcgcccaggcaatttttaagaaaatcaacaaaagaaaaatcctccaggtggacgtttagagcctcgggaacaacgatgaagtaaatgcaagcggtgcgttccagcatggttagttagctgatctgtagaaaaaacaaaaatgaacattaaaccatgctagcctggcgaacaggtgggtaaatcgttctctccagcaccaggcaggccacggggtctccggcgcgaccctcgtaaaaattgtcgctatgattgaaaaccatcacagagagacgttcccggtggccggcgtgaatgattcgacaagatgaatacacccccggaacattggcgtccgcgagtgaaaaaaagcgcccgaggaagcaataaggcactacaatgctcagtctcaagtccagcaaagcgatgccatgcggatgaagcacaaaattctcaggtgcgtacaaaatgtaattactcccctcctgcacaggcagcaaagcccccgatccctccaggtacacatacaaagcctcagcgtccatagcttaccgagcagcagcacacaacaggcgcaagagtcagagaaaggctgagctctaacctgtccacccgctctctgctcaatatatagcccagatctacactgacgtaaaggccaaagtctaaaaatacccgccaaataatcacacacgcccagcacacgcccagaaaccggtgacacactcaaaaaaatacgcgcacttcctcaaacgcccaaaactgccgtcatttccgggttcccacgctacgtcatcaaaacacgactttcaaattccgtcgaccgttaaaaacgtcacccgccccgcccctaacggtcgcccgtctctcagccaatcagcgccccgcatccccaaattcaaacacctcatttgcatattaacgcgcacaaaaagtttgaggtatattattgatgatgg

SEQ ID NO: 59 - DNA, 9750 bp, Artificial Sequence
  Synthetic Construct
ggcgtaatgctctgccagtgttacaaccaattaaccaattctgattagaaaaactcatcgagcatcaaatgaaactgcaatttattcatatcaggattatcaataccatatttttgaaaaagccgtttctgtaatgaaggagaaaactcaccgaggcagttccataggatggcaagatcctggtatcggtctgcgattccgactcgtccaacatcaatacaacctattaatttcccctcgtcaaaaataaggttatcaagtgagaaatcaccatgagtgacgactgaatccggtgagaatggcaaaagcttatgcatttctttccagacttgttcaacaggccagccattacgctcgtcatcaaaatcactcgcatcaaccaaaccgttattcattcgtgattgcgcctgagcgagacgaaatacgcgatcgctgttaaaaggacaattacaaacaggaatcaaatgcaaccggcgcaggaacactgccagcgcatcaacaatattttcacctgaatcaggatattcttctaatacctggaatgctgttttcccggggatcgcagtggtgagtaaccatgcatcatcaggagtacggataaaatgcttgatggtcggaagaggcataaattccgtcagccagtttagtctgaccatctcatctgtaacatcattggcaacgctacctttgccatgtttcagaaacaactctggcgcatcgggcttcccatacaatcgatagattgtcgcacctgattgcccgacattatcgcgagcccatttatacccatataaatcagcatccatgttggaatttaatcgcggcctcgagcaagacgtttcccgttgaatatggctcataacaccccttgtattactgtttatgtaagcagacaggtcgacaatattggctattggccattgcatacgttgtatctatatcataatatgtacatttatattggctcatgtccaatatgaccgccatgttgacattgattattgactagttattaatagtaatcaattacggggtcattagttcatagcccatatatggagttccgcgttacataacttacggtaaatggcccgcctggctgaccgcccaacgacccccgcccattgacgtcaataatgacgtatgttcccatagtaacgccaatagggactttccattgacgtcaatgggtggagtatttacggtaaactgcccacttggcagtacatcaagtgtatcatatgccaagtccgccccctattgacgtcaatgacggtaaatggcccgcctggcattatgcccagtacatgaccttacgggactttcctacttggcagtacatctacgtattagtcatcgctattaccatggtgatgcggttttggcagtacaccaatgggcgtggatagcggtttgactcacggggatttccaagtctccaccccattgacgtcaatgggagtttgttttggcaccaaaatcaacgggactttccaaaatgtcgtaataaccccgccccgttgacgcaaatgggcggtaggcgtgtacggtgggaggtctatataagcagagctcgtttagtgaaccgtcagatcgcctggagacgccatccacgctgttttgacctccatagaagacaccgggaccgatccagcctccgcggccgggaacggtgcattggaacgcggattccccgtgccaagagtgactcaccgtccggatctcagcaagcaggtatgtactctccagggtgggcctggcttccccagtcaagactccagggatttgagggacgctgtgggctcttctcttacatgtaccttttgcttgcctcaaccctgactatcttccaggtcaggatcccagagtcaggggtctgtattttcctgctggtggctccagttcaggaacagtaaaccctgctccgaatattgcctctcacatctcgtcaatctccgcgaggactggggaccctgtgacgaacatggctagcgaatcgccaagcgcaccccctcatcggtggtgcatcccttggcaacgcctcctcctgaccgcctcactgctgactttctggaacccgccgaccaccgcaaagctgaccattgagagcactcccttcaacgtggctgaggggaaggaggtgctgctcctggtgcacaatctgccccagcacctgttcgggtactcctggtacaagggagaacgcgtggacgggaaccggcagatcataggctacgtcatcggaacccagcaggccacacccggtccagcgtacagcggccgggagattatctacccgaacgcctccctgctgatccaaaacatcatccagaacgacaccggtttctacactctgcacgtgattaagtcagatctggtcaacgaagaggccaccggccaattcagggtgtaccccgaactccctaagccgttcatcacctcgaacaacagcaacccggtcgaggatgaagatgcggtggccttgacgtgcgaacctgagatccagaacaccacctacttgtggtgggtgaacaatcagagcctgccagtctccccacgactccagctgtcgaacgacaacaggaccctgactttgctgtccgtgactcggaacgacgtgggcccttatgaatgcggtatccagaacaagctgtccgtggaccacagcgaccctgtgatcctgaacgtcctttacgggccggacgaccccaccatttccccgtcgtacacttactaccggccgggcgtgaacctgtccctgtcgtgccacgctgcctccaatccgccggcccagtactcctggctcatcgacggaaacatccagcagcacacccaagaactgttcatctccaacattaccgagaaaaactcgggactttacacctgtcaagccaacaattccgccagcggccactcccgcaccactgtcaaaactatcactgtgtccgccgaactcccgaagcccagcatcagctccaacaactcgaagcccgtggaggataaggacgctgtcgcgttcacctgtgaaccagaggcacagaataccacctacctttggtgggtcaacggacagtccctgcctgtctcaccgagactgcagctgtcaaacgggaataggactctgaccttgtttaacgtcacccggaacgacgcccgggcctacgtgtgcggcatccagaactccgtgagcgcaaaccggtctgacccagtgaccctggatgtgctgtacggccccgacactccgatcatttcaccccccgattcatcctacctgtccggcgctaacctcaacctctcatgccactccgcatccaaccccagcccgcaatattcgtggcgcattaacggaattcctcagcaacatacccaggtcctgttcattgcgaagatcacccctaacaacaacggaacctacgcctgctttgtgtcaaacctggccactggtagaaacaactccatcgtgaagtccattaccgtgtcggcgtccggaacttccccgggcctgagcgccggcgccaccgtgggaattatgatcggcgtgctcgtgggagtggccctgatcggatccggcgagggcagaggcagcctgctgacatgtggcgacgtggaagagaaccctggccccacccctggaacccagagccccttcttccttctgctgctgctgaccgtgctgactgtcgtgacaggctctggccacgccagctctacacctggcggcgagaaagagacaagcgccacccagagaagcagcgtgccaagcagcaccgagaagaacgccgtgtccatgaccagctccgtgctgagcagccactctcctggcagcggcagcagcacaacacagggccaggatgtgacactggcccctgccacagaacctgcctctggatctgccgccacctggggacaggacgtgacaagcgtgccagtgaccagacctgccctgggctctacaacaccccctgcccacgatgtgaccagcgcccctgataacaagcctgcccctggaagcacagcccctccagctcatggcgtgacctctgccccagataccagaccagccccaggatctacagccccacccgcacacggcgtgacaagtgcccctgacacaagacccgctccaggctctactgctcctcctgcccatggcgtgacaagcgctcccgatacaaggccagctcctggctccacagcaccaccagcacatggcgtgacatcagctcccgacactagacctgctcccggatcaaccgctccaccagctcacggcgtgaccagcgcacctgataccagacctgctctgggaagcaccgcccctcccgtgcacaatgtgacatctgcttccggcagcgccagcggctctgcctctacactggtgcacaacggcaccagcgccagagccacaacaaccccagccagcaagagcacccccttcagcatccctagccaccacagcgacacccctaccacactggccagccactccaccaagaccgatgcctctagcacccaccactccagcgtgccccctctgaccagcagcaaccacagcacaagcccccagctgtctaccggcgtctcattcttctttctgtccttccacatcagcaacctgcagttcaacagcagcctggaagatcccagcaccgactactaccaggaactgcagcgggatatcagcgagatgttcctgcaaatctacaagcagggcggcttcctgggcctgagcaacatcaagttcagacccggcagcgtggtggtgcagctgaccctggctttccgggaaggcaccatcaacgtgcacgacgtggaaacccagttcaaccagtacaagaccgaggccgccagccggtacaacctgaccatctccgatgtgtccgtgtccgacgtgcccttcccattctctgcccagtctggcgcaggcgtgccaggatggggaattgctctgctggtgctcgtgtgcgtgctggtggccctggccatcgtgtatctgattgccctggccgtgtgccagtgccggcggaagaattacggccagctggacatcttccccgccagagacacctaccaccccatgagcgagtaccccacataccacacccacggcagatacgtgccacccagctccaccgacagatccccctacgagaaagtgtctgccggcaacggcggcagctccctgagctacacaaatcctgccgtggccgctgcctccgccaacctgggatccggcacaatcctgtctgagggcgccaccaacttcagcctgctgaaactggccggcgacgtggaactgaaccctggccctggagctgccccggagccggagaggacccccgttggccagggatcgtgggcccatccgggacgcaccaggggaccatccgacaggggattctgtgtggtgtcaccggccaggccagcagaagaggcaaccagcctcgagggagcgttgtctggaaccagacattcccacccgtcggtgggccggcagcaccacgcgggaccaccgtccacttccagaccgccacggccatgggacaccccttgcccgcctgtgtatgccgagactaaacacttcctgtactcatccggagacaaggaacagcttcggccgtccttcctcctgtcgtcgctcagaccgagcctgaccggagcacgcagattggtggaaactatcttccttgggtcacgtccgtggatgccaggtaccccacggcgcctcccgcgcctcccacagagatactggcagatgcggcctctgttcctggaattgctgggaaaccacgctcagtgcccgtacggagtcctgctcaagactcactgccctctgagggcggcggtcactccggcggccggagtgtgcgcacgggagaagccccagggaagcgtggcagctccggaagaggaggacaccgatccgcgccgcctcgtgcaacttctgcgccagcactcctcgccctggcaagtctacgggttcgtccgcgcctgcctgcgccgcctggtgccgcctgggctctggggttcccggcataacgagcgccgcttcctgagaaatactaagaagtttatctcacttggaaaacatgccaagttgtcgctgcaagaactcacgtggaagatgtcagtccgcgattgcgcctggctgcgccgctcgccgggcgtcgggtgtgttccagctgcagaacaccgcctgagagaagaaattctggccaaatttctgcattggctgatgtcagtgtacgtggtcgagctgctgcgctcctttttctacgtcactgagactacctttcaaaagaaccgcctgttcttctaccgcaaatctgtgtggagcaagctgcagtcaatcggcattcgccagcatctgaagagggtgcagctgcgggaactttccgaggcagaagtccgccagcaccgggaggcccggccggcgcttctcacgtcgcgtctgagattcatcccaaagcccgacgggctgaggcctatcgtcaacatggattacgtcgtgggcgctcgcacctttcgccgtgaaaagcgggccgaacgcttgacctcacgggtgaaggccctcttctccgtgctgaactacgagagagcaagacggcctggcctgctgggagcttcggtgctgggactggacgatatccaccgggcttggcggacctttgttctccgggtgagagcccaagaccctccgccggaactgtacttcgtgaaggtggcgatcaccggagcctatgatactattccgcaagatcgactcaccgaagtcatcgcctcgatcatcaaaccgcagaacacttactgcgtcaggcggtacgccgtggtccagaaggccgcgcatggccacgtgagaaaggcgttcaagtcgcacgtgtccactctcaccgacctccagccttacatgaggcaattcgttgcgcatttgcaagagacttcgcccctgagagatgcggtggtcatcgagcagagctccagcctgaacgaagcgagcagcggtctgtttgacgtgttcctccgcttcatgtgtcatcacgcggtgcgaatcaggggaaaatcatacgtgcagtgccagggaatcccacaaggcagcattctgtcgactctcttgtgttccctttgctacggcgatatggaaaacaagctgttcgctgggatcagacgggacgggttgctgctcagactggtggacgacttcctgctggtgactccgcacctcactcacgccaaaacctttctccgcactctggtgaggggagtgccagaatacggctgtgtggtcaatctccggaaaactgtggtgaatttccctgtcgaggatgaggcactcggaggaaccgcatttgtccaaatgccagcacatggcctgttcccatggtgcggtctgctgctggacacccgaactcttgaagtgcagtccgactactccagctatgcccggacgagcatccgcgccagcctcactttcaatcgcggctttaaggccggacgaaacatgcgcagaaagcttttcggagtcctccggcttaaatgccattcgctctttctcgatctccaagtcaattcgctgcagaccgtgtgcacgaacatctacaagatcctgctgctccaagcctaccggttccacgcttgcgtgcttcagctgccgtttcaccaacaggtgtggaagaacccgaccttctttctgcgggtcattagcgatactgcctccctgtgttactcaatcctcaaggcaaagaacgccggaatgtcgctgggtgcgaaaggagccgcgggacctcttcctagcgaagcggtgcagtggctctgccaccaggctttcctcctgaagctgaccaggcacagagtgacctacgtcccgctgctgggctcgctgcgcactgcacagacccagctgtctagaaaactccccggcaccaccctgaccgctctggaagccgccgccaacccagcattgccgtcagatttcaagaccatcttggactgaagatctgggccctaacaaaacaaaaagatggggttattccctaaacttcatgggttacgtaattggaagttgggggacattgccacaagatcatattgtacaaaagatcaaacactgttttagaaaacttcctgtaaacaggcctattgattggaaagtatgtcaaaggattgtgggtcttttgggctttgctgctccatttacacaatgtggatatcctgccttaatgcctttgtatgcatgtatacaagctaaacaggctttcactttctcgccaacttacaaggcctttctaagtaaacagtacatgaacctttaccccgttgctcggcaacggcctggtctgtgccaagtgtttgctgacgcaacccccactggctggggcttggccataggccatcagcgcatgcgtggaacctttgtggctcctctgccgatccatactgcggaactcctagccgcttgttttgctcgcagccggtctggagcaaagctcataggaactgacaattctgtcgtcctctcgcggaaatatacatcgtttcgatctacgtatgatctttttccctctgccaaaaattatggggacatcatgaagccccttgagcatctgacttctggctaataaaggaaatttattttcattgcaatagtgtgttggaattttttgtgtctctcactcggaaggaattctgcattaatgaatcggccaacgcgcggggagaggcggtttgcgtattgggcgctcttccgcttcctcgctcactgactcgctgcgctcggtcgttcggctgcggcgagcggtatcagctcactcaaaggcggtaatacggttatccacagaatcaggggataacgcaggaaagaacatgtgagcaaaaggccagcaaaaggccaggaaccgtaaaaaggccgcgttgctggcgtttttccataggctccgcccccctgacgagcatcacaaaaatcgacgctcaagtcagaggtggcgaaacccgacaggactataaagataccaggcgtttccccctggaagctccctcgtgcgctctcctgttccgaccctgccgcttaccggatacctgtccgcctttctcccttcgggaagcgtggcgctttctcatagctcacgctgtaggtatctcagttcggtgtaggtcgttcgctccaagctgggctgtgtgcacgaaccccccgttcagcccgaccgctgcgccttatccggtaactatcgtcttgagtccaacccggtaagacacgacttatcgccactggcagcagccactggtaacaggattagcagagcgaggtatgtaggcggtgctacagagttcttgaagtggtggcctaactacggctacactagaagaacagtatttggtatctgcgctctgctgaagccagttaccttcggaaaaagagttggtagctcttgatccggcaaacaaaccaccgctggtagcggtggtttttttgtttgcaagcagcagattacgcgcagaaaaaaaggatctcaagaagatcctttgatcttttctacggggtctgacgctcagtggaacgaaaactcacgttaagggattttggtcatgagattatcaaaaaggatcttcacctagatccttttaaattaaaaatgaagttttaaatcaatctaaagtatatatgagtaaacttggtctgacagttaccaatgcttaatcagtgaggcacctatctcagcgatctgtctatttcgttcatccatagttgcctgactc

SEQ ID NO: 60 - DNA, 36262 bp, Artificial Sequence
  Synthetic Construct
ccatcttcaataatatacctcaaactttttgtgcgcgttaatatgcaaatgaggcgtttgaatttggggaggaagggcggtgattggtcgagggatgagcgaccgttaggggcggggcgagtgacgttttgatgacgtggttgcgaggaggagccagtttgcaagttctcgtgggaaaagtgacgtcaaacgaggtgtggtttgaacacggaaatactcaattttcccgcgctctctgacaggaaatgaggtgtttctgggcggatgcaagtgaaaacgggccattttcgcgcgaaaactgaatgaggaagtgaaaatctgagtaatttcgcgtttatggcagggaggagtatttgccgagggccgagtagactttgaccgattacgtgggggtttcgattaccgtgtttttcacctaaatttccgcgtacggtgtcaaagtccggtgtttttactactgtaatagtaatcaattacggggtcattagttcatagcccatatatggagttccgcgttacataacttacggtaaatggcccgcctggctgaccgcccaacgacccccgcccattgacgtcaataatgacgtatgttcccatagtaacgccaatagggactttccattgacgtcaatgggtggagtatttacggtaaactgcccacttggcagtacatcaagtgtatcatatgccaagtacgccccctattgacgtcaatgacggtaaatggcccgcctggcattatgcccagtacatgaccttatgggactttcctacttggcagtacatctacgtattagtcatcgctattaccatggtgatgcggttttggcagtacatcaatgggcgtggatagcggtttgactcacggggatttccaagtctccaccccattgacgtcaatgggagtttgttttggcaccaaaatcaacgggactttccaaaatgtcgtaacaactccgccccattgacgcaaatgggcggtaggcgtgtacggtgggaggtctatataagcagagctgtccctatcagtgatagagatctccctatcagtgatagagagtttagtgaaccgtcagatccgctagggtaccgcgatcaccatggctagcgaatcgccaagcgcaccccctcatcggtggtgcatcccttggcaacgcctcctcctgaccgcctcactgctgactttctggaacccgccgaccaccgcaaagctgaccattgagagcactcccttcaacgtggctgaggggaaggaggtgctgctcctggtgcacaatctgccccagcacctgttcgggtactcctggtacaagggagaacgcgtggacgggaaccggcagatcataggctacgtcatcggaacccagcaggccacacccggtccagcgtacagcggccgggagattatctacccgaacgcctccctgctgatccaaaacatcatccagaacgacaccggtttctacactctgcacgtgattaagtcagatctggtcaacgaagaggccaccggccaattcagggtgtaccccgaactccctaagccgttcatcacctcgaacaacagcaacccggtcgaggatgaagatgcggtggccttgacgtgcgaacctgagatccagaacaccacctacttgtggtgggtgaacaatcagagcctgccagtctccccacgactccagctgtcgaacgacaacaggaccctgactttgctgtccgtgactcggaacgacgtgggcccttatgaatgcggtatccagaacaagctgtccgtggaccacagcgaccctgtgatcctgaacgtcctttacgggccggacgaccccaccatttccccgtcgtacacttactaccggccgggcgtgaacctgtccctgtcgtgccacgctgcctccaatccgccggcccagtactcctggctcatcgacggaaacatccagcagcacacccaagaactgttcatctccaacattaccgagaaaaactcgggactttacacctgtcaagccaacaattccgccagcggccactcccgcaccactgtcaaaactatcactgtgtccgccgaactcccgaagcccagcatcagctccaacaactcgaagcccgtggaggataaggacgctgtcgcgttcacctgtgaaccagaggcacagaataccacctacctttggtgggtcaacggacagtccctgcctgtctcaccgagactgcagctgtcaaacgggaataggactctgaccttgtttaacgtcacccggaacgacgcccgggcctacgtgtgcggcatccagaactccgtgagcgcaaaccggtctgacccagtgaccctggatgtgctgtacggccccgacactccgatcatttcaccccccgattcatcctacctgtccggcgctaacctcaacctctcatgccactccgcatccaaccccagcccgcaatattcgtggcgcattaacggaattcctcagcaacatacccaggtcctgttcattgcgaagatcacccctaacaacaacggaacctacgcctgctttgtgtcaaacctggccactggtagaaacaactccatcgtgaagtccattaccgtgtcggcgtccggaacttccccgggcctgagcgccggcgccaccgtgggaattatgatcggcgtgctcgtgggagtggccctgatcggatccggcgagggcagaggcagcctgctgacatgtggcgacgtggaagagaaccctggccccacccctggaacccagagccccttcttccttctgctgctgctgaccgtgctgactgtcgtgacaggctctggccacgccagctctacacctggcggcgagaaagagacaagcgccacccagagaagcagcgtgccaagcagcaccgagaagaacgccgtgtccatgaccagctccgtgctgagcagccactctcctggcagcggcagcagcacaacacagggccaggatgtgacactggcccctgccacagaacctgcctctggatctgccgccacctggggacaggacgtgacaagcgtgccagtgaccagacctgccctgggctctacaacaccccctgcccacgatgtgaccagcgcccctgataacaagcctgcccctggaagcacagcccctccagctcatggcgtgacctctgccccagataccagaccagccccaggatctacagccccacccgcacacggcgtgacaagtgcccctgacacaagacccgctccaggctctactgctcctcctgcccatggcgtgacaagcgctcccgatacaaggccagctcctggctccacagcaccaccagcacatggcgtgacatcagctcccgacactagacctgctcccggatcaaccgctccaccagctcacggcgtgaccagcgcacctgataccagacctgctctgggaagcaccgcccctcccgtgcacaatgtgacatctgcttccggcagcgccagcggctctgcctctacactggtgcacaacggcaccagcgccagagccacaacaaccccagccagcaagagcacccccttcagcatccctagccaccacagcgacacccctaccacactggccagccactccaccaagaccgatgcctctagcacccaccactccagcgtgccccctctgaccagcagcaaccacagcacaagcccccagctgtctaccggcgtctcattcttctttctgtccttccacatcagcaacctgcagttcaacagcagcctggaagatcccagcaccgactactaccaggaactgcagcgggatatcagcgagatgttcctgcaaatctacaagcagggcggcttcctgggcctgagcaacatcaagttcagacccggcagcgtggtggtgcagctgaccctggctttccgggaaggcaccatcaacgtgcacgacgtggaaacccagttcaaccagtacaagaccgaggccgccagccggtacaacctgaccatctccgatgtgtccgtgtccgacgtgcccttcccattctctgcccagtctggcgcaggcgtgccaggatggggaattgctctgctggtgctcgtgtgcgtgctggtggccctggccatcgtgtatctgattgccctggccgtgtgccagtgccggcggaagaattacggccagctggacatcttccccgccagagacacctaccaccccatgagcgagtaccccacataccacacccacggcagatacgtgccacccagctccaccgacagatccccctacgagaaagtgtctgccggcaacggcggcagctccctgagctacacaaatcctgccgtggccgctgcctccgccaacctgggatccggcacaatcctgtctgagggcgccaccaacttcagcctgctgaaactggccggcgacgtggaactgaaccctggccctggagctgccccggagccggagaggacccccgttggccagggatcgtgggcccatccgggacgcaccaggggaccatccgacaggggattctgtgtggtgtcaccggccaggccagcagaagaggcaaccagcctcgagggagcgttgtctggaaccagacattcccacccgtcggtgggccggcagcaccacgcgggaccaccgtccacttccagaccgccacggccatgggacaccccttgcccgcctgtgtatgccgagactaaacacttcctgtactcatccggagacaaggaacagcttcggccgtccttcctcctgtcgtcgctcagaccgagcctgaccggagcacgcagattggtggaaactatcttccttgggtcacgtccgtggatgccaggtaccccacggcgcctcccgcgcctcccacagagatactggcagatgcggcctctgttcctggaattgctgggaaaccacgctcagtgcccgtacggagtcctgctcaagactcactgccctctgagggcggcggtcactccggcggccggagtgtgcgcacgggagaagccccagggaagcgtggcagctccggaagaggaggacaccgatccgcgccgcctcgtgcaacttctgcgccagcactcctcgccctggcaagtctacgggttcgtccgcgcctgcctgcgccgcctggtgccgcctgggctctggggttcccggcataacgagcgccgcttcctgagaaatactaagaagtttatctcacttggaaaacatgccaagttgtcgctgcaagaactcacgtggaagatgtcagtccgcgattgcgcctggctgcgccgctcgccgggcgtcgggtgtgttccagctgcagaacaccgcctgagagaagaaattctggccaaatttctgcattggctgatgtcagtgtacgtggtcgagctgctgcgctcctttttctacgtcactgagactacctttcaaaagaaccgcctgttcttctaccgcaaatctgtgtggagcaagctgcagtcaatcggcattcgccagcatctgaagagggtgcagctgcgggaactttccgaggcagaagtccgccagcaccgggaggcccggccggcgcttctcacgtcgcgtctgagattcatcccaaagcccgacgggctgaggcctatcgtcaacatggattacgtcgtgggcgctcgcacctttcgccgtgaaaagcgggccgaacgcttgacctcacgggtgaaggccctcttctccgtgctgaactacgagagagcaagacggcctggcctgctgggagcttcggtgctgggactggacgatatccaccgggcttggcggacctttgttctccgggtgagagcccaagaccctccgccggaactgtacttcgtgaaggtggcgatcaccggagcctatgatactattccgcaagatcgactcaccgaagtcatcgcctcgatcatcaaaccgcagaacacttactgcgtcaggcggtacgccgtggtccagaaggccgcgcatggccacgtgagaaaggcgttcaagtcgcacgtgtccactctcaccgacctccagccttacatgaggcaattcgttgcgcatttgcaagagacttcgcccctgagagatgcggtggtcatcgagcagagctccagcctgaacgaagcgagcagcggtctgtttgacgtgttcctccgcttcatgtgtcatcacgcggtgcgaatcaggggaaaatcatacgtgcagtgccagggaatcccacaaggcagcattctgtcgactctcttgtgttccctttgctacggcgatatggaaaacaagctgttcgctgggatcagacgggacgggttgctgctcagactggtggacgacttcctgctggtgactccgcacctcactcacgccaaaacctttctccgcactctggtgaggggagtgccagaatacggctgtgtggtcaatctccggaaaactgtggtgaatttccctgtcgaggatgaggcactcggaggaaccgcatttgtccaaatgccagcacatggcctgttcccatggtgcggtctgctgctggacacccgaactcttgaagtgcagtccgactactccagctatgcccggacgagcatccgcgccagcctcactttcaatcgcggctttaaggccggacgaaacatgcgcagaaagcttttcggagtcctccggcttaaatgccattcgctctttctcgatctccaagtcaattcgctgcagaccgtgtgcacgaacatctacaagatcctgctgctccaagcctaccggttccacgcttgcgtgcttcagctgccgtttcaccaacaggtgtggaagaacccgaccttctttctgcgggtcattagcgatactgcctccctgtgttactcaatcctcaaggcaaagaacgccggaatgtcgctgggtgcgaaaggagccgcgggacctcttcctagcgaagcggtgcagtggctctgccaccaggctttcctcctgaagctgaccaggcacagagtgacctacgtcccgctgctgggctcgctgcgcactgcacagacccagctgtctagaaaactccccggcaccaccctgaccgctctggaagccgccgccaacccagcattgccgtcagatttcaagaccatcttggactgacgcacctcgagctgatcataatcagccataccacatttgtagaggttttacttgctttaaaaaacctcccacacctccccctgaacctgaaacataaaatgaatgcaattgttgttgttaacttgtttattgcagcttataatggttacaaataaagcaatagcatcacaaatttcacaaataaagcatttttttcactgcattctagttgtggtttgtccaaactcatcaatgtatcttaccaggtgccgagcctgcgagtgcggagggaagcatgccaggttccagcccgtgtgtgtggatgtgacggaggacctgcgacccgatcatttggtgttgccctgcaccgggacggagttcggttccagcggggaagaatctgactagagtgagtagtgttctggggcgggggaggacctgcatgagggccagaataactgaaatctgtgcttttctgtgtgttgcagcagcatgagcggaagcggctcctttgagggaggggtattcagcccttatctgacggggcgtctcccctcctgggcgggagtgcgtcagaatgtgatgggatccacggtggacggccggcccgtgcagcccgcgaactcttcaaccctgacctatgcaaccctgagctcttcgtcgttggacgcagctgccgccgcagctgctgcatctgccgccagcgccgtgcgcggaatggccatgggcgccggctactacggcactctggtggccaactcgagttccaccaataatcccgccagcctgaacgaggagaagctgttgctgctgatggcccagctcgaggccttgacccagcgcctgggcgagctgacccagcaggtggctcagctgcaggagcagacgcgggccgcggttgccacggtgaaatccaaataaaaaatgaatcaataaataaacggagacggttgttgattttaacacagagtctgaatctttatttgatttttcgcgcgcggtaggccctggaccaccggtctcgatcattgagcacccggtggatcttttccaggacccggtagaggtgggcttggatgttgaggtacatgggcatgagcccgtcccgggggtggaggtagctccattgcagggcctcgtgctcgggggtggtgttgtaaatcacccagtcatagcaggggcgcagggcatggtgttgcacaatatctttgaggaggagactgatggccacgggcagccctttggtgtaggtgtttacaaatctgttgagctgggagggatgcatgcggggggagatgaggtgcatcttggcctggatcttgagattggcgatgttaccgcccagatcccgcctggggttcatgttgtgcaggaccaccagcacggtgtatccggtgcacttggggaatttatcatgcaacttggaagggaaggcgtgaaagaatttggcgacgcctttgtgcccgcccaggttttccatgcactcatccatgatgatggcgatgggcccgtgggcggcggcctgggcaaagacgtttcgggggtcggacacatcatagttgtggtcctgggtgaggtcatcataggccattttaatgaatttggggcggagggtgccggactgggggacaaaggtaccctcgatcccgggggcgtagttcccctcacagatctgcatctcccaggctttgagctcggagggggggatcatgtccacctgcggggcgataaagaacacggtttccggggcgggggagatgagctgggccgaaagcaagttccggagcagctgggacttgccgcagccggtggggccgtagatgaccccgatgaccggctgcaggtggtagttgagggagagacagctgccgtcctcccggaggaggggggccacctcgttcatcatctcgcgcacgtgcatgttctcgcgcaccagttccgccaggaggcgctctccccccagggataggagctcctggagcgaggcgaagtttttcagcggcttgagtccgtcggccatgggcattttggagagggtttgttgcaagagttccaggcggtcccagagctcggtgatgtgctctacggcatctcgatccagcagacctcctcgtttcgcgggttgggacggctgcgggagtagggcaccagacgatgggcgtccagcgcagccagggtccggtccttccagggtcgcagcgtccgcgtcagggtggtctccgtcacggtgaaggggtgcgcgccgggctgggcgcttgcgagggtgcgcttcaggctcatccggctggtcgaaaaccgctcccgatcggcgccctgcgcgtcggccaggtagcaattgaccatgagttcgtagttgagcgcctcggccgcgtggcctttggcgcggagcttacctttggaagtctgcccgcaggcgggacagaggagggacttgagggcgtagagcttgggggcgaggaagacggactcgggggcgtaggcgtccgcgccgcagtgggcgcagacggtctcgcactccacgagccaggtgaggtcgggctggtcggggtcaaaaaccagtttcccgccgttctttttgatgcgtttcttacctttggtctccatgagctcgtgtccccgctgggtgacaaagaggctgtccgtgtccccgtagaccgactttatgggccggtcctcgagcggtgtgccgcggtcctcctcgtagaggaaccccgcccactccgagacgaaagcccgggtccaggccagcacgaaggaggccacgtgggacgggtagcggtcgttgtccaccagcgggtccaccttttccagggtatgcaaacacatgtccccctcgtccacatccaggaaggtgattggcttgtaagtgtaggccacgtgaccgggggtcccggccgggggggtataaaagggtgcgggtccctgctcgtcctcactgtcttccggatcgctgtccaggagcgccagctgttggggtaggtattccctctcgaaggcgggcatgacctcggcactcaggttgtcagtttctagaaacgaggaggatttgatattgacggtgccggcggagatgcctttcaagagcccctcgtccatctggtcagaaaagacgatctttttgttgtcgagcttggtggcgaaggagccgtagagggcgttggagaggagcttggcgatggagcgcatggtctggtttttttccttgtcggcgcgctccttggcggcgatgttgagctgcacgtactcgcgcgccacgcacttccattcggggaagacggtggtcagctcgtcgggcacgattctgacctgccagccccgattatgcagggtgatgaggtccacactggtggccacctcgccgcgcaggggctcattagtccagcagaggcgtccgcccttgcgcgagcagaaggggggcagggggtccagcatgacctcgtcgggggggtcggcatcgatggtgaagatgccgggcaggaggtcggggtcaaagtagctgatggaagtggccagatcgtccagggcagcttgccattcgcgcacggccagcgcgcgctcgtagggactgaggggcgtgccccagggcatgggatgggtaagcgcggaggcgtacatgccgcagatgtcgtagacgtagaggggctcctcgaggatgccgatgtaggtggggtagcagcgccccccgcggatgctggcgcgcacgtagtcatacagctcgtgcgagggggcgaggagccccgggcccaggttggtgcgactgggcttttcggcgcggtagacgatctggcggaaaatggcatgcgagttggaggagatggtgggcctttggaagatgttgaagtgggcgtggggcagtccgaccgagtcgcggatgaagtgggcgtaggagtcttgcagcttggcgacgagctcggcggtgactaggacgtccagagcgcagtagtcgagggtctcctggatgatgtcatacttgagctgtcccttttgtttccacagctcgcggttgagaaggaactcttcgcggtccttccagtactcttcgagggggaacccgtcctgatctgcacggtaagagcctagcatgtagaactggttgacggccttgtaggcgcagcagcccttctccacggggagggcgtaggcctgggcggccttgcgcagggaggtgtgcgtgagggcgaaagtgtccctgaccatgaccttgaggaactggtgcttgaagtcgatatcgtcgcagcccccctgctcccagagctggaagtccgtgcgcttcttgtaggcggggttgggcaaagcgaaagtaacatcgttgaagaggatcttgcccgcgcggggcataaagttgcgagtgatgcggaaaggttggggcacctcggcccggttgttgatgacctgggcggcgagcacgatctcgtcgaagccgttgatgttgtggcccacgatgtagagttccacgaatcgcggacggcccttgacgtggggcagtttcttgagctcctcgtaggtgagctcgtcggggtcgctgagcccgtgctgctcgagcgcccagtcggcgagatgggggttggcgcggaggaaggaagtccagagatccacggccagggcggtttgcagacggtcccggtactgacggaactgctgcccgacggccattttttcgggggtgacgcagtagaaggtgcgggggtccccgtgccagcgatcccatttgagctggagggcgagatcgagggcgagctcgacgagccggtcgtccccggagagtttcatgaccagcatgaaggggacgagctgcttgccgaaggaccccatccaggtgtaggtttccacatcgtaggtgaggaagagcctttcggtgcgaggatgcgagccgatggggaagaactggatctcctgccaccaattggaggaatggctgttgatgtgatggaagtagaaatgccgacggcgcgccgaacactcgtgcttgtgtttatacaagcggccacagtgctcgcaacgctgcacgggatgcacgtgctgcacgagctgtacctgagttcctttgacgaggaatttcagtgggaagtggagtcgtggcgcctgcatctcgtgctgtactacgtcgtggtggtcggcctggccctcttctgcctcgatggtggtcatgctgacgagcccgcgcgggaggcaggtccagacctcggcgcgagcgggtcggagagcgaggacgagggcgcgcaggccggagctgtccagggtcctgagacgctgcggagtcaggtcagtgggcagcggcggcgcgcggttgacttgcaggagtttttccagggcgcgcgggaggtccagatggtacttgatctccaccgcgccattggtggcgacgtcgatggcttgcagggtcccgtgcccctggggtgtgaccaccgtcccccgtttcttcttgggcggctggggcgacgggggcggtgcctcttccatggttagaagcggcggcgaggacgcgcgccgggcggcaggggcggctcggggcccggaggcaggggcggcaggggcacgtcggcgccgcgcgcgggtaggttctggtactgcgcccggagaagactggcgtgagcgacgacgcgacggttgacgtcctggatctgacgcctctgggtgaaggccacgggacccgtgagtttgaacctgaaagagagttcgacagaatcaatctcggtatcgttgacggcggcctgccgcaggatctcttgcacgtcgcccgagttgtcctggtaggcgatctcggtcatgaactgctcgatctcctcctcttgaaggtctccgcggccggcgcgctccacggtggccgcgaggtcgttggagatgcggcccatgagctgcgagaaggcgttcatgcccgcctcgttccagacgcggctgtagaccacgacgccctcgggatcgcgggcgcgcatgaccacctgggcgaggttgagctccacgtggcgcgtgaagaccgcgtagttgcagaggcgctggtagaggtagttgagcgtggtggcgatgtgctcggtgacgaagaaatacatgatccagcggcggagcggcatctcgctgacgtcgcccagcgcctccaaacgttccatggcctcgtaaaagtccacggcgaagttgaaaaactgggagttgcgcgccgagacggtcaactcctcctccagaagacggatgagctcggcgatggtggcgcgcacctcgcgctcgaaggcccccgggagttcctccacttcctcttcttcctcctccactaacatctcttctacttcctcctcaggcggcagtggtggcgggggagggggcctgcgtcgccggcggcgcacgggcagacggtcgatgaagcgctcgatggtctcgccgcgccggcgtcgcatggtctcggtgacggcgcgcccgtcctcgcggggccgcagcgtgaagacgccgccgcgcatctccaggtggccgggggggtccccgttgggcagggagagggcgctgacgatgcatcttatcaattgccccgtagggactccgcgcaaggacctgagcgtctcgagatccacgggatctgaaaaccgctgaacgaaggcttcgagccagtcgcagtcgcaaggtaggctgagcacggtttcttctggcgggtcatgttggttgggagcggggcgggcgatgctgctggtgatgaagttgaaataggcggttctgagacggcggatggtggcgaggagcaccaggtctttgggcccggcttgctggatgcgcagacggtcggccatgccccaggcgtggtcctgacacctggccaggtccttgtagtagtcctgcatgagccgctccacgggcacctcctcctcgcccgcgcggccgtgcatgcgcgtgagcccgaagccgcgctggggctggacgagcgccaggtcggcgacgacgcgctcggcgaggatggcttgctggatctgggtgagggtggtctggaagtcatcaaagtcgacgaagcggtggtaggctccggtgttgatggtgtaggagcagttggccatgacggaccagttgacggtctggtggcccggacgcacgagctcgtggtacttgaggcgcgagtaggcgcgcgtgtcgaagatgtagtcgttgcaggtgcgcaccaggtactggtagccgatgaggaagtgcggcggcggctggcggtagagcggccatcgctcggtggcgggggcgccgggcgcgaggtcctcgagcatggtgcggtggtagccgtagatgtacctggacatccaggtgatgccggcggcggtggtggaggcgcgcgggaactcgcggacgcggttccagatgttgcgcagcggcaggaagtagttcatggtgggcacggtctggcccgtgaggcgcgcgcagtcgtggatgctctatacgggcaaaaacgaaagcggtcagcggctcgactccgtggcctggaggctaagcgaacgggttgggctgcgcgtgtaccccggttcgaatctcgaatcaggctggagccgcagctaacgtggtattggcactcccgtctcgacccaagcctgcaccaaccctccaggatacggaggcgggtcgttttgcaacttttttttggaggccggatgagactagtaagcgcggaaagcggccgaccgcgatggctcgctgccgtagtctggagaagaatcgccagggttgcgttgcggtgtgccccggttcgaggccggccggattccgcggctaacgagggcgtggctgccccgtcgtttccaagaccccatagccagccgacttctccagttacggagcgagcccctcttttgttttgtttgtttttgccagatgcatcccgtactgcggcagatgcgcccccaccaccctccaccgcaacaacagccccctccacagccggcgcttctgcccccgccccagcagcaacttccagccacgaccgccgcggccgccgtgagcggggctggacagagttatgatcaccagctggccttggaagagggcgaggggctggcgcgcctgggggcgtcgtcgccggagcggcacccgcgcgtgcagatgaaaagggacgctcgcgaggcctacgtgcccaagcagaacctgttcagagacaggagcggcgaggagcccgaggagatgcgcgcggcccggttccacgcggggcgggagctgcggcgcggcctggaccgaaagagggtgctgagggacgaggatttcgaggcggacgagctgacggggatcagccccgcgcgcgcgcacgtggccgcggccaacctggtcacggcgtacgagcagaccgtgaaggaggagagcaacttccaaaaatccttcaacaaccacgtgcgcaccctgatcgcgcgcgaggaggtgaccctgggcctgatgcacctgtgggacctgctggaggccatcgtgcagaaccccaccagcaagccgctgacggcgcagctgttcctggtggtgcagcatagtcgggacaacgaagcgttcagggaggcgctgctgaatatcaccgagcccgagggccgctggctcctggacctggtgaacattctgcagagcatcgtggtgcaggagcgcgggctgccgctgtccgagaagctggcggccatcaacttctcggtgctgagtttgggcaagtactacgctaggaagatctacaagaccccgtacgtgcccatagacaaggaggtgaagatcgacgggttttacatgcgcatgaccctgaaagtgctgaccctgagcgacgatctgggggtgtaccgcaacgacaggatgcaccgtgcggtgagcgccagcaggcggcgcgagctgagcgaccaggagctgatgcatagtctgcagcgggccctgaccggggccgggaccgagggggagagctactttgacatgggcgcggacctgcactggcagcccagccgccgggccttggaggcggcggcaggaccctacgtagaagaggtggacgatgaggtggacgaggagggcgagtacctggaagactgatggcgcgaccgtatttttgctagatgcaacaacaacagccacctcctgatcccgcgatgcgggcggcgctgcagagccagccgtccggcattaactcctcggacgattggacccaggccatgcaacgcatcatggcgctgacgacccgcaaccccgaagcctttagacagcagccccaggccaaccggctctcggccatcctggaggccgtggtgccctcgcgctccaaccccacgcacgagaaggtcctggccatcgtgaacgcgctggtggagaacaaggccatccgcggcgacgaggccggcctggtgtacaacgcgctgctggagcgcgtggcccgctacaacagcaccaacgtgcagaccaacctggaccgcatggtgaccgacgtgcgcgaggccgtggcccagcgcgagcggttccaccgcgagtccaacctgggatccatggtggcgctgaacgccttcctcagcacccagcccgccaacgtgccccggggccaggaggactacaccaacttcatcagcgccctgcgcctgatggtgaccgaggtgccccagagcgaggtgtaccagtccgggccggactacttcttccagaccagtcgccagggcttgcagaccgtgaacctgagccaggctttcaagaacttgcagggcctgtggggcgtgcaggccccggtcggggaccgcgcgacggtgtcgagcctgctgacgccgaactcgcgcctgctgctgctgctggtggcccccttcacggacagcggcagcatcaaccgcaactcgtacctgggctacctgattaacctgtaccgcgaggccatcggccaggcgcacgtggacgagcagacctaccaggagatcacccacgtgagccgcgccctgggccaggacgacccgggcaacctggaagccaccctgaactttttgctgaccaaccggtcgcagaagatcccgccccagtacgcgctcagcaccgaggaggagcgcatcctgcgttacgtgcagcagagcgtgggcctgttcctgatgcaggagggggccacccccagcgccgcgctcgacatgaccgcgcgcaacatggagcccagcatgtacgccagcaaccgcccgttcatcaataaactgatggactacttgcatcgggcggccgccatgaactctgactatttcaccaacgccatcctgaatccccactggctcccgccgccggggttctacacgggcgagtacgacatgcccgaccccaatgacgggttcctgtgggacgatgtggacagcagcgtgttctccccccgaccgggtgctaacgagcgccccttgtggaagaaggaaggcagcgaccgacgcccgtcctcggcgctgtccggccgcgagggtgctgccgcggcggtgcccgaggccgccagtcctttcccgagcttgcccttctcgctgaacagtatccgcagcagcgagctgggcaggatcacgcgcccgcgcttgctgggcgaagaggagtacttgaatgactcgctgttgagacccgagcgggagaagaacttccccaataacgggatagaaagcctggtggacaagatgagccgctggaagacgtatgcgcaggagcacagggacgatccccgggcgtcgcagggggccacgagccggggcagcgccgcccgtaaacgccggtggcacgacaggcagcggggacagatgtgggacgatgaggactccgccgacgacagcagcgtgttggacttgggtgggagtggtaacccgttcgctcacctgcgcccccgtatcgggcgcatgatgtaagagaaaccgaaaataaatgatactcaccaaggccatggcgaccagcgtgcgttcgtttcttctctgttgttgttgtatctagtatgatgaggcgtgcgtacccggagggtcctcctccctcgtacgagagcgtgatgcagcaggcgatggcggcggcggcgatgcagcccccgctggaggctccttacgtgcccccgcggtacctggcgcctacggaggggcggaacagcattcgttactcggagctggcacccttgtacgataccacccggttgtacctggtggacaacaagtcggcggacatcgcctcgctgaactaccagaacgaccacagcaacttcctgaccaccgtggtgcagaacaatgacttcacccccacggaggccagcacccagaccatcaactttgacgagcgctcgcggtggggcggccagctgaaaaccatcatgcacaccaacatgcccaacgtgaacgagttcatgtacagcaacaagttcaaggcgcgggtgatggtctcccgcaagacccccaatggggtgacagtgacagaggattatgatggtagtcaggatgagctgaagtatgaatgggtggaatttgagctgcccgaaggcaacttctcggtgaccatgaccatcgacctgatgaacaacgccatcatcgacaattacttggcggtggggcggcagaacggggtgctggagagcgacatcggcgtgaagttcgacactaggaacttcaggctgggctgggaccccgtgaccgagctggtcatgcccggggtgtacaccaacgaggctttccatcccgatattgtcttgctgcccggctgcggggtggacttcaccgagagccgcctcagcaacctgctgggcattcgcaagaggcagcccttccaggaaggcttccagatcatgtacgaggatctggaggggggcaacatccccgcgctcctggatgtcgacgcctatgagaaaagcaaggaggatgcagcagctgaagcaactgcagccgtagctaccgcctctaccgaggtcaggggcgataattttgcaagcgccgcagcagtggcagcggccgaggcggctgaaaccgaaagtaagatagtcattcagccggtggagaaggatagcaagaacaggagctacaacgtactaccggacaagataaacaccgcctaccgcagctggtacctagcctacaactatggcgaccccgagaagggcgtgcgctcctggacgctgctcaccacctcggacgtcacctgcggcgtggagcaagtctactggtcgctgcccgacatgatgcaagacccggtcaccttccgctccacgcgtcaagttagcaactacccggtggtgggcgccgagctcctgcccgtctactccaagagcttcttcaacgagcaggccgtctactcgcagcagctgcgcgccttcacctcgcttacgcacgtcttcaaccgcttccccgagaaccagatcctcgtccgcccgcccgcgcccaccattaccaccgtcagtgaaaacgttcctgctctcacagatcacgggaccctgccgctgcgcagcagtatccggggagtccagcgcgtgaccgttactgacgccagacgccgcacctgcccctacgtctacaaggccctgggcatagtcgcgccgcgcgtcctctcgagccgcaccttctaaatgtccattctcatctcgcccagtaataacaccggttggggcctgcgcgcgcccagcaagatgtacggaggcgctcgccaacgctccacgcaacaccccgtgcgcgtgcgcgggcacttccgcgctccctggggcgccctcaagggccgcgtgcggtcgcgcaccaccgtcgacgacgtgatcgaccaggtggtggccgacgcgcgcaactacacccccgccgccgcgcccgtctccaccgtggacgccgtcatcgacagcgtggtggccgacgcgcgccggtacgcccgcgccaagagccggcggcggcgcatcgcccggcggcaccggagcacccccgccatgcgcgcggcgcgagccttgctgcgcagggccaggcgcacgggacgcagggccatgctcagggcggccagacgcgcggcttcaggcgccagcgccggcaggacccggagacgcgcggccacggcggcggcagcggccatcgccagcatgtcccgcccgcggcgagggaacgtgtactgggtgcgcgacgccgccaccggtgtgcgcgtgcccgtgcgcacccgcccccctcgcacttgaagatgttcacttcgcgatgttgatgtgtcccagcggcgaggaggatgtccaagcgcaaattcaaggaagagatgctccaggtcatcgcgcctgagatctacggccctgcggtggtgaaggaggaaagaaagccccgcaaaatcaagcgggtcaaaaaggacaaaaaggaagaagaaagtgatgtggacggattggtggagtttgtgcgcgagttcgccccccggcggcgcgtgcagtggcgcgggcggaaggtgcaaccggtgctgagacccggcaccaccgtggtcttcacgcccggcgagcgctccggcaccgcttccaagcgctcctacgacgaggtgtacggggatgatgatattctggagcaggcggccgagcgcctgggcgagtttgcttacggcaagcgcagccgttccgcaccgaaggaagaggcggtgtccatcccgctggaccacggcaaccccacgccgagcctcaagcccgtgaccttgcagcaggtgctgccgaccgcggcgccgcgccgggggttcaagcgcgagggcgaggatctgtaccccaccatgcagctgatggtgcccaagcgccagaagctggaagacgtgctggagaccatgaaggtggacccggacgtgcagcccgaggtcaaggtgcggcccatcaagcaggtggccccgggcctgggcgtgcagaccgtggacatcaagattcccacggagcccatggaaacgcagaccgagcccatgatcaagcccagcaccagcaccatggaggtgcagacggatccctggatgccatcggctcctagtcgaagaccccggcgcaagtacggcgcggccagcctgctgatgcccaactacgcgctgcatccttccatcatccccacgccgggctaccgcggcacgcgcttctaccgcggtcataccagcagccgccgccgcaagaccaccactcgccgccgccgtcgccgcaccgccgctgcaaccacccctgccgccctggtgcggagagtgtaccgccgcggccgcgcacctctgaccctgccgcgcgcgcgctaccacccgagcatcgccatttaaactttcgcctgctttgcagatcaatggccctcacatgccgccttcgcgttcccattacgggctaccgaggaagaaaaccgcgccgtagaaggctggcggggaacgggatgcgtcgccaccaccaccggcggcggcgcgccatcagcaagcggttggggggaggcttcctgcccgcgctgatccccatcatcgccgcggcgatcggggcgatccccggcattgcttccgtggcggtgcaggcctctcagcgccactgagacacacttggaaacatcttgtaataaaccaatggactctgacgctcctggtcctgtgatgtgttttcgtagacagatggaagacatcaatttttcgtccctggctccgcgacacggcacgcggccgttcatgggcacctggagcgacatcggcaccagccaactgaacgggggcgccttcaattggagcagtctctggagcgggcttaagaatttcgggtccacgcttaaaacctatggcagcaaggcgtggaacagcaccacagggcaggcgctgagggataagctgaaagagcagaacttccagcagaaggtggtcgatgggctcgcctcgggcatcaacggggtggtggacctggccaaccaggccgtgcagcggcagatcaacagccgcctggacccggtgccgcccgccggctccgtggagatgccgcaggtggaggaggagctgcctcccctggacaagcggggcgagaagcgaccccgccccgatgcggaggagacgctgctgacgcacacggacgagccgcccccgtacgaggaggcggtgaaactgggtctgcccaccacgcggcccatcgcgcccctggccaccggggtgctgaaacccgaaaagcccgcgaccctggacttgcctcctccccagccttcccgcccctctacagtggctaagcccctgccgccggtggccgtggcccgcgcgcgacccgggggcaccgcccgccctcatgcgaactggcagagcactctgaacagcatcgtgggtctgggagtgcagagtgtgaagcgccgccgctgctattaaacctaccgtagcgcttaacttgcttgtctgtgtgtgtatgtattatgtcgccgccgccgctgtccaccagaaggaggagtgaagaggcgcgtcgccgagttgcaagatggccaccccatcgatgctgccccagtgggcgtacatgcacatcgccggacaggacgcttcggagtacctgagtccgggtctggtgcagtttgcccgcgccacagacacctacttcagtctggggaacaagtttaggaaccccacggtggcgcccacgcacgatgtgaccaccgaccgcagccagcggctgacgctgcgcttcgtgcccgtggaccgcgaggacaacacctactcgtacaaagtgcgctacacgctggccgtgggcgacaaccgcgtgctggacatggccagcacctactttgacatccgcggcgtgctggatcggggccctagcttcaaaccctactccggcaccgcctacaacagtctggcccccaagggagcacccaacacttgtcagtggacatataaagccgatggtgaaactgccacagaaaaaacctatacatatggaaatgcacccgtgcagggcattaacatcacaaaagatggtattcaacttggaactgacaccgatgatcagccaatctacgcagataaaacctatcagcctgaacctcaagtgggtgatgctgaatggcatgacatcactggtactgatgaaaagtatggaggcagagctcttaagcctgataccaaaatgaagccttgttatggttcttttgccaagcctactaataaagaaggaggtcaggcaaatgtgaaaacaggaacaggcactactaaagaatatgacatagacatggctttctttgacaacagaagtgcggctgctgctggcctagctccagaaattgttttgtatactgaaaatgtggatttggaaactccagatacccatattgtatacaaagcaggcacagatgacagcagctcttctattaatttgggtcagcaagccatgcccaacagacctaactacattggtttcagagacaactttatcgggctcatgtactacaacagcactggcaatatgggggtgctggccggtcaggcttctcagctgaatgctgtggttgacttgcaagacagaaacaccgagctgtcctaccagctcttgcttgactctctgggtgacagaacccggtatttcagtatgtggaatcaggcggtggacagctatgatcctgatgtgcgcattattgaaaatcatggtgtggaggatgaacttcccaactattgtttccctctggatgctgttggcagaacagatacttatcagggaattaaggctaatggaactgatcaaaccacatggaccaaagatgacagtgtcaatgatgctaatgagataggcaagggtaatccattcgccatggaaatcaacatccaagccaacctgtggaggaacttcctctacgccaacgtggccctgtacctgcccgactcttacaagtacacgccggccaatgttaccctgcccaccaacaccaacacctacgattacatgaacggccgggtggtggcgccctcgctggtggactcctacatcaacatcggggcgcgctggtcgctggatcccatggacaacgtgaaccccttcaaccaccaccgcaatgcggggctgcgctaccgctccatgctcctgggcaacgggcgctacgtgcccttccacatccaggtgccccagaaatttttcgccatcaagagcctcctgctcctgcccgggtcctacacctacgagtggaacttccgcaaggacgtcaacatgatcctgcagagctccctcggcaacgacctgcgcacggacggggcctccatctccttcaccagcatcaacctctacgccaccttcttccccatggcgcacaacacggcctccacgctcgaggccatgctgcgcaacgacaccaacgaccagtccttcaacgactacctctcggcggccaacatgctctaccccatcccggccaacgccaccaacgtgcccatctccatcccctcgcgcaactgggccgccttccgcggctggtccttcacgcgtctcaagaccaaggagacgccctcgctgggctccgggttcgacccctacttcgtctactcgggctccatcccctacctcgacggcaccttctacctcaaccacaccttcaagaaggtctccatcaccttcgactcctccgtcagctggcccggcaacgaccggctcctgacgcccaacgagttcgaaatcaagcgcaccgtcgacggcgagggctacaacgtggcccagtgcaacatgaccaaggactggttcctggtccagatgctggcccactacaacatcggctaccagggcttctacgtgcccgagggctacaaggaccgcatgtactccttcttccgcaacttccagcccatgagccgccaggtggtggacgaggtcaactacaaggactaccaggccgtcaccctggcctaccagcacaacaactcgggcttcgtcggctacctcgcgcccaccatgcgccagggccagccctaccccgccaactacccctacccgctcatcggcaagagcgccgtcaccagcgtcacccagaaaaagttcctctgcgacagggtcatgtggcgcatccccttctccagcaacttcatgtccatgggcgcgctcaccgacctcggccagaacatgctctatgccaactccgcccacgcgctagacatgaatttcgaagtcgaccccatggatgagtccacccttctctatgttgtcttcgaagtcttcgacgtcgtccgagtgcaccagccccaccgcggcgtcatcgaggccgtctacctgcgcacccccttctcggccggtaacgccaccacctaagctcttgcttcttgcaagccatggccgcgggctccggcgagcaggagctcagggccatcatccgcgacctgggctgcgggccctacttcctgggcaccttcgataagcgcttcccgggattcatggccccgcacaagctggcctgcgccatcgtcaacacggccggccgcgagaccgggggcgagcactggctggccttcgcctggaacccgcgctcgaacacctgctacctcttcgaccccttcgggttctcggacgagcgcctcaagcagatctaccagttcgagtacgagggcctgctgcgccgcagcgccctggccaccgaggaccgctgcgtcaccctggaaaagtccacccagaccgtgcagggtccgcgctcggccgcctgcgggctcttctgctgcatgttcctgcacgccttcgtgcactggcccgaccgccccatggacaagaaccccaccatgaacttgctgacgggggtgcccaacggcatgctccagtcgccccaggtggaacccaccctgcgccgcaaccaggaggcgctctaccgcttcctcaactcccactccgcctactttcgctcccaccgcgcgcgcatcgagaaggccaccgccttcgaccgcatgaatcaagacatgtaaaccgtgtgtgtatgttaaatgtctttaataaacagcactttcatgttacacatgcatctgagatgatttatttagaaatcgaaagggttctgccgggtctcggcatggcccgcgggcagggacacgttgcggaactggtacttggccagccacttgaactcggggatcagcagtttgggcagcggggtgtcggggaaggagtcggtccacagcttccgcgtcagttgcagggcgcccagcaggtcgggcgcggagatcttgaaatcgcagttgggacccgcgttctgcgcgcgggagttgcggtacacggggttgcagcactggaacaccatcagggccgggtgcttcacgctcgccagcaccgtcgcgtcggtgatgctctccacgtcgaggtcctcggcgttggccatcccgaagggggtcatcttgcaggtctgccttcccatggtgggcacgcacccgggcttgtggttgcaatcgcagtgcagggggatcagcatcatctgggcctggtcggcgttcatccccgggtacatggccttcatgaaagcctccaattgcctgaacgcctgctgggccttggctccctcggtgaagaagaccccgcaggacttgctagagaactggttggtggcgcacccggcgtcgtgcacgcagcagcgcgcgtcgttgttggccagctgcaccacgctgcgcccccagcggttctgggtgatcttggcccggtcggggttctccttcagcgcgcgctgcccgttctcgctcgccacatccatctcgatcatgtgctccttctggatcatggtggtcccgtgcaggcaccgcagcttgccctcggcctcggtgcacccgtgcagccacagcgcgcacccggtgcactcccagttcttgtgggcgatctgggaatgcgcgtgcacgaagccctgcaggaagcggcccatcatggtggtcagggtcttgttgctagtgaaggtcagcggaatgccgcggtgctcctcgttgatgtacaggtggcagatgcggcggtacacctcgccctgctcgggcatcagctggaagttggctttcaggtcggtctccacgcggtagcggtccatcagcatagtcatgatttccatacccttctcccaggccgagacgatgggcaggctcatagggttcttcaccatcatcttagcgctagcagccgcggccagggggtcgctctcgtccagggtctcaaagctccgcttgccgtccttctcggtgatccgcaccggggggtagctgaagcccacggccgccagctcctcctcggcctgtctttcgtcctcgctgtcctggctgacgtcctgcaggaccacatgcttggtcttgcggggtttcttcttgggcggcagcggcggcggagatgttggagatggcgagggggagcgcgagttctcgctcaccactactatctcttcctcttcttggtccgaggccacgcggcggtaggtatgtctcttcgggggcagaggcggaggcgacgggctctcgccgccgcgacttggcggatggctggcagagccccttccgcgttcgggggtgcgctcccggcggcgctctgactgacttcctccgcggccggccattgtgttctcctagggaggaacaacaagcatggagactcagccatcgccaacctcgccatctgcccccaccgccgacgagaagcagcagcagcagaatgaaagcttaaccgccccgccgcccagccccgccacctccgacgcggccgtcccagacatgcaagagatggaggaatccatcgagattgacctgggctatgtgacgcccgcggagcacgaggaggagctggcagtgcgcttttcacaagaagagatacaccaagaacagccagagcaggaagcagagaatgagcagagtcaggctgggctcgagcatgacggcgactacctccacctgagcgggggggaggacgcgctcatcaagcatctggcccggcaggccaccatcgtcaaggatgcgctgctcgaccgcaccgaggtgcccctcagcgtggaggagctcagccgcgcctacgagttgaacctcttctcgccgcgcgtgccccccaagcgccagcccaatggcacctgcgagcccaacccgcgcctcaacttctacccggtcttcgcggtgcccgaggccctggccacctaccacatctttttcaagaaccaaaagatccccgtctcctgccgcgccaaccgcacccgcgccgacgcccttttcaacctgggtcccggcgcccgcctacctgatatcgcctccttggaagaggttcccaagatcttcgagggtctgggcagcgacgagactcgggccgcgaacgctctgcaaggagaaggaggagagcatgagcaccacagcgccctggtcgagttggaaggcgacaacgcgcggctggcggtgctcaaacgcacggtcgagctgacccatttcgcctacccggctctgaacctgccccccaaagtcatgagcgcggtcatggaccaggtgctcatcaagcgcgcgtcgcccatctccgaggacgagggcatgcaagactccgaggagggcaagcccgtggtcagcgacgagcagctggcccggtggctgggtcctaatgctagtccccagagtttggaagagcggcgcaaactcatgatggccgtggtcctggtgaccgtggagctggagtgcctgcgccgcttcttcgccgacgcggagaccctgcgcaaggtcgaggagaacctgcactacctcttcaggcacgggttcgtgcgccaggcctgcaagatctccaacgtggagctgaccaacctggtctcctacatgggcatcttgcacgagaaccgcctggggcagaacgtgctgcacaccaccctgcgcggggaggcccggcgcgactacatccgcgactgcgtctacctctacctctgccacacctggcagacgggcatgggcgtgtggcagcagtgtctggaggagcagaacctgaaagagctctgcaagctcctgcagaagaacctcaagggtctgtggaccgggttcgacgagcgcaccaccgcctcggacctggccgacctcattttccccgagcgcctcaggctgacgctgcgcaacggcctgcccgactttatgagccaaagcatgttgcaaaactttcgctctttcatcctcgaacgctccggaatcctgcccgccacctgctccgcgctgccctcggacttcgtgccgctgaccttccgcgagtgccccccgccgctgtggagccactgctacctgctgcgcctggccaactacctggcctaccactcggacgtgatcgaggacgtcagcggcgagggcctgctcgagtgccactgccgctgcaacctctgcacgccgcaccgctccctggcctgcaacccccagctgctgagcgagacccagatcatcggcaccttcgagttgcaagggcccagcgaaggcgagggttcagccgccaaggggggtctgaaactcaccccggggctgtggacctcggcctacttgcgcaagttcgtgcccgaggactaccatcccttcgagatcaggttctacgaggaccaatcccatccgcccaaggccgagctgtcggcctgcgtcatcacccagggggcgatcctggcccaattgcaagccatccagaaatcccgccaagaattcttgctgaaaaagggccgcggggtctacctcgacccccagaccggtgaggagctcaaccccggcttcccccaggatgccccgaggaaacaagaagctgaaagtggagctgccgcccgtggaggatttggaggaagactgggagaacagcagtcaggcagaggaggaggagatggaggaagactgggacagcactcaggcagaggaggacagcctgcaagacagtctggaggaagacgaggaggaggcagaggaggaggtggaagaagcagccgccgccagaccgtcgtcctcggcgggggagaaagcaagcagcacggataccatctccgctccgggtcggggtcccgctcgaccacacagtagatgggacgagaccggacgattcccgaaccccaccacccagaccggtaagaaggagcggcagggatacaagtcctggcgggggcacaaaaacgccatcgtctcctgcttgcaggcctgcgggggcaacatctccttcacccggcgctacctgctcttccaccgcggggtgaactttccccgcaacatcttgcattactaccgtcacctccacagcccctactacttccaagaagaggcagcagcagcagaaaaagaccagcagaaaaccagcagctagaaaatccacagcggcggcagcaggtggactgaggatcgcggcgaacgagccggcgcaaacccgggagctgaggaaccggatctttcccaccctctatgccatcttccagcagagtcgggggcaggagcaggaactgaaagtcaagaaccgttctctgcgctcgctcacccgcagttgtctgtatcacaagagcgaagaccaacttcagcgcactctcgaggacgccgaggctctcttcaacaagtactgcgcgctcactcttaaagagtagcccgcgcccgcccagtcgcagaaaaaggcgggaattacgtcacctgtgcccttcgccctagccgcctccacccatcatcatgagcaaagagattcccacgccttacatgtggagctaccagccccagatgggcctggccgccggtgccgcccaggactactccacccgcatgaattggctcagcgccgggcccgcgatgatctcacgggtgaatgacatccgcgcccaccgaaaccagatactcctagaacagtcagcgctcaccgccacgccccgcaatcacctcaatccgcgtaattggcccgccgccctggtgtaccaggaaattccccagcccacgaccgtactacttccgcgagacgcccaggccgaagtccagctgactaactcaggtgtccagctggcgggcggcgccaccctgtgtcgtcaccgccccgctcagggtataaagcggctggtgatccggggcagaggcacacagctcaacgacgaggtggtgagctcttcgctgggtctgcgacctgacggagtcttccaactcgccggatcggggagatcttccttcacgcctcgtcaggccgtcctgactttggagagttcgtcctcgcagccccgctcgggtggcatcggcactctccagttcgtggaggagttcactccctcggtctacttcaaccccttctccggctcccccggccactacccggacgagttcatcccgaacttcgacgccatcagcgagtcggtggacggctacgattgaatgtcccatggtggcgcagctgacctagctcggcttcgacacctggaccactgccgccgcttccgctgcttcgctcgggatctcgccgagtttgcctactttgagctgcccgaggagcaccctcagggcccggcccacggagtgcggatcgtcgtcgaagggggcctcgactcccacctgcttcggatcttcagccagcgtccgatcctggtcgagcgcgagcaaggacagacccttctgactctgtactgcatctgcaaccaccccggcctgcatgaaagtctttgttgtctgctgtgtactgagtataataaaagctgagatcagcgactactccggacttccgtgtgtttaaactcacccccttatccagtgaaataaagatcatattgatgatgattttacagaaataaaaaataatcatttgatttgaaataaagatacaatcatattgatgatttgagtttaacaaaaaaataaagaatcacttacttgaaatctgataccaggtctctgtccatgttttctgccaacaccacttcactcccctcttcccagctctggtactgcaggccccggcgggctgcaaacttcctccacacgctgaaggggatgtcaaattcctcctgtccctcaatcttcattttatcttctatcagatgtccaaaaagcgcgtccgggtggatgatgacttcgaccccgtctacccctacgatgcagacaacgcaccgaccgtgcccttcatcaacccccccttcgtctcttcagatggattccaagagaagcccctgggggtgttgtccctgcgactggccgaccccgtcaccaccaagaacggggaaatcaccctcaagctgggagagggggtggacctcgattcctcgggaaaactcatctccaacacggccaccaaggccgccgcccctctcagtttttccaacaacaccatttcccttaacatggatcaccccttttacactaaagatggaaaattatccttacaagtttctccaccattaaatatactgagaacaagcattctaaacacactagctttaggttttggatcaggtttaggactccgtggctctgccttggcagtacagttagtctctccacttacatttgatactgatggaaacataaagcttaccttagacagaggtttgcatgttacaacaggagatgcaattgaaagcaacataagctgggctaaaggtttaaaatttgaagatggagccatagcaaccaacattggaaatgggttagagtttggaagcagtagtacagaaacaggtgttgatgatgcttacccaatccaagttaaacttggatctggccttagctttgacagtacaggagccataatggctggtaacaaagaagacgataaactcactttgtggacaacacctgatccatcaccaaactgtcaaatactcgcagaaaatgatgcaaaactaacactttgcttgactaaatgtggtagtcaaatactggccactgtgtcagtcttagttgtaggaagtggaaacctaaaccccattactggcaccgtaagcagtgctcaggtgtttctacgttttgatgcaaacggtgttcttttaacagaacattctacactaaaaaaatactgggggtataggcagggagatagcatagatggcactccatataccaatgctgtaggattcatgcccaatttaaaagcttatccaaagtcacaaagttctactactaaaaataatatagtagggcaagtatacatgaatggagatgtttcaaaacctatgcttctcactataaccctcaatggtactgatgacagcaacagtacatattcaatgtcattttcatacacctggactaatggaagctatgttggagcaacatttggggctaactcttataccttctcatacatcgcccaagaatgaacactgtatcccaccctgcatgccaacccttcccaccccactctgtggaacaaactctgaaacacaaaataaaataaagttcaagtgttttattgattcaacagttttacaggattcgagcagttatttttcctccaccctcccaggacatggaatacaccaccctctccccccgcacagccttgaacatctgaatgccattggtgatggacatgcttttggtctccacgttccacacagtttcagagcgagccagtctcgggtcggtcagggagatgaaaccctccgggcactcccgcatctgcacctcacagctcaacagctgaggattgtcctcggtggtcgggatcacggttatctggaagaagcagaagagcggcggtgggaatcatagtccgcgaacgggatcggccggtggtgtcgcatcaggccccgcagcagtcgctgccgccgccgctccgtcaagctgctgctcagggggtccgggtccagggactccctcagcatgatgcccacggccctcagcatcagtcgtctggtgcggcgggcgcagcagcgcatgcggatctcgctcaggtcgctgcagtacgtgcaacacagaaccaccaggttgttcaacagtccatagttcaacacgctccagccgaaactcatcgcgggaaggatgctacccacgtggccgtcgtaccagatcctcaggtaaatcaagtggtgccccctccagaacacgctgcccacgtacatgatctccttgggcatgtggcggttcaccacctcccggtaccacatcaccctctggttgaacatgcagccccggatgatcctgcggaaccacagggccagcaccgccccgcccgccatgcagcgaagagaccccgggtcccggcaatggcaatggaggacccaccgctcgtacccgtggatcatctgggagctgaacaagtctatgttggcacagcacaggcatatgctcatgcatctcttcagcactctcaactcctcgggggtcaaaaccatatcccagggcacggggaactcttgcaggacagcgaaccccgcagaacagggcaatcctcgcacagaacttacattgtgcatggacagggtatcgcaatcaggcagcaccgggtgatcctccaccagagaagcgcgggtctcggtctcctcacagcgtggtaagggggccggccgatacgggtgatggcgggacgcggctgatcgtgttcgcgaccgtgtcatgatgcagttgctttcggacattttcgtacttgctgtagcagaacctggtccgggcgctgcacaccgatcgccggcggcggtctcggcgcttggaacgctcggtgttgaaattgtaaaacagccactctctcagaccgtgcagcagatctagggcctcaggagtgatgaagatcccatcatgcctgatggctctgatcacatcgaccaccgtggaatgggccagacccagccagatgatgcaattttgttgggtttcggtgacggcgggggagggaagaacaggaagaaccatgattaacttttaatccaaacggtctcggagtacttcaaaatgaagatcgcggagatggcacctctcgcccccgctgtgttggtggaaaataacagccaggtcaaaggtgatacggttctcgagatgttccacggtggcttccagcaaagcctccacgcgcacatccagaaacaagacaatagcgaaagcgggagggttctctaattcctcaatcatcatgttacactcctgcaccatccccagataattttcatttttccagccttgaatgattcgaactagttcctgaggtaaatccaagccagccatgataaagagctcgcgcagagcgccctccaccggcattcttaagcacaccctcataattccaagatattctgctcctggttcacctgcagcagattgacaagcggaatatcaaaatctctgccgcgatccctgagctcctccctcagcaataactgtaagtactctttcatatcctctccgaaatttttagccataggaccaccaggaataagattagggcaagccacagtacagataaaccgaagtcctccccagtgagcattgccaaatgcaagactgctataagcatgctggctagacccggtgatatcttccagataactggacagaaaatcgcccaggcaatttttaagaaaatcaacaaaagaaaaatcctccaggtggacgtttagagcctcgggaacaacgatgaagtaaatgcaagcggtgcgttccagcatggttagttagctgatctgtagaaaaaacaaaaatgaacattaaaccatgctagcctggcgaacaggtgggtaaatcgttctctccagcaccaggcaggccacggggtctccggcgcgaccctcgtaaaaattgtcgctatgattgaaaaccatcacagagagacgttcccggtggccggcgtgaatgattcgacaagatgaatacacccccggaacattggcgtccgcgagtgaaaaaaagcgcccgaggaagcaataaggcactacaatgctcagtctcaagtccagcaaagcgatgccatgcggatgaagcacaaaattctcaggtgcgtacaaaatgtaattactcccctcctgcacaggcagcaaagcccccgatccctccaggtacacatacaaagcctcagcgtccatagcttaccgagcagcagcacacaacaggcgcaagagtcagagaaaggctgagctctaacctgtccacccgctctctgctcaatatatagcccagatctacactgacgtaaaggccaaagtctaaaaatacccgccaaataatcacacacgcccagcacacgcccagaaaccggtgacacactcaaaaaaatacgcgcacttcctcaaacgcccaaaactgccgtcatttccgggttcccacgctacgtcatcaaaacacgactttcaaattccgtcgaccgttaaaaacgtcacccgccccgcccctaacggtcgcccgtctctcagccaatcagcgccccgcatccccaaattcaaacacctcatttgcatattaacgcgcacaaaaagtttgaggtatattattgatgatgg

SEQ ID NO: 61 - DNA, 9771 bp, Artificial Sequence
  Synthetic Construct
ggcgtaatgctctgccagtgttacaaccaattaaccaattctgattagaaaaactcatcgagcatcaaatgaaactgcaatttattcatatcaggattatcaataccatatttttgaaaaagccgtttctgtaatgaaggagaaaactcaccgaggcagttccataggatggcaagatcctggtatcggtctgcgattccgactcgtccaacatcaatacaacctattaatttcccctcgtcaaaaataaggttatcaagtgagaaatcaccatgagtgacgactgaatccggtgagaatggcaaaagcttatgcatttctttccagacttgttcaacaggccagccattacgctcgtcatcaaaatcactcgcatcaaccaaaccgttattcattcgtgattgcgcctgagcgagacgaaatacgcgatcgctgttaaaaggacaattacaaacaggaatcaaatgcaaccggcgcaggaacactgccagcgcatcaacaatattttcacctgaatcaggatattcttctaatacctggaatgctgttttcccggggatcgcagtggtgagtaaccatgcatcatcaggagtacggataaaatgcttgatggtcggaagaggcataaattccgtcagccagtttagtctgaccatctcatctgtaacatcattggcaacgctacctttgccatgtttcagaaacaactctggcgcatcgggcttcccatacaatcgatagattgtcgcacctgattgcccgacattatcgcgagcccatttatacccatataaatcagcatccatgttggaatttaatcgcggcctcgagcaagacgtttcccgttgaatatggctcataacaccccttgtattactgtttatgtaagcagacaggtcgacaatattggctattggccattgcatacgttgtatctatatcataatatgtacatttatattggctcatgtccaatatgaccgccatgttgacattgattattgactagttattaatagtaatcaattacggggtcattagttcatagcccatatatggagttccgcgttacataacttacggtaaatggcccgcctggctgaccgcccaacgacccccgcccattgacgtcaataatgacgtatgttcccatagtaacgccaatagggactttccattgacgtcaatgggtggagtatttacggtaaactgcccacttggcagtacatcaagtgtatcatatgccaagtccgccccctattgacgtcaatgacggtaaatggcccgcctggcattatgcccagtacatgaccttacgggactttcctacttggcagtacatctacgtattagtcatcgctattaccatggtgatgcggttttggcagtacaccaatgggcgtggatagcggtttgactcacggggatttccaagtctccaccccattgacgtcaatgggagtttgttttggcaccaaaatcaacgggactttccaaaatgtcgtaataaccccgccccgttgacgcaaatgggcggtaggcgtgtacggtgggaggtctatataagcagagctcgtttagtgaaccgtcagatcgcctggagacgccatccacgctgttttgacctccatagaagacaccgggaccgatccagcctccgcggccgggaacggtgcattggaacgcggattccccgtgccaagagtgactcaccgtccggatctcagcaagcaggtatgtactctccagggtgggcctggcttccccagtcaagactccagggatttgagggacgctgtgggctcttctcttacatgtaccttttgcttgcctcaaccctgactatcttccaggtcaggatcccagagtcaggggtctgtattttcctgctggtggctccagttcaggaacagtaaaccctgctccgaatattgcctctcacatctcgtcaatctccgcgaggactggggaccctgtgacgaacatggctagcggagctgccccggagccggagaggacccccgttggccagggatcgtgggcccatccgggacgcaccaggggaccatccgacaggggattctgtgtggtgtcaccggccaggccagcagaagaggcaaccagcctcgagggagcgttgtctggaaccagacattcccacccgtcggtgggccggcagcaccacgcgggaccaccgtccacttccagaccgccacggccatgggacaccccttgcccgcctgtgtatgccgagactaaacacttcctgtactcatccggagacaaggaacagcttcggccgtccttcctcctgtcgtcgctcagaccgagcctgaccggagcacgcagattggtggaaactatcttccttgggtcacgtccgtggatgccaggtaccccacggcgcctcccgcgcctcccacagagatactggcagatgcggcctctgttcctggaattgctgggaaaccacgctcagtgcccgtacggagtcctgctcaagactcactgccctctgagggcggcggtcactccggcggccggagtgtgcgcacgggagaagccccagggaagcgtggcagctccggaagaggaggacaccgatccgcgccgcctcgtgcaacttctgcgccagcactcctcgccctggcaagtctacgggttcgtccgcgcctgcctgcgccgcctggtgccgcctgggctctggggttcccggcataacgagcgccgcttcctgagaaatactaagaagtttatctcacttggaaaacatgccaagttgtcgctgcaagaactcacgtggaagatgtcagtccgcgattgcgcctggctgcgccgctcgccgggcgtcgggtgtgttccagctgcagaacaccgcctgagagaagaaattctggccaaatttctgcattggctgatgtcagtgtacgtggtcgagctgctgcgctcctttttctacgtcactgagactacctttcaaaagaaccgcctgttcttctaccgcaaatctgtgtggagcaagctgcagtcaatcggcattcgccagcatctgaagagggtgcagctgcgggaactttccgaggcagaagtccgccagcaccgggaggcccggccggcgcttctcacgtcgcgtctgagattcatcccaaagcccgacgggctgaggcctatcgtcaacatggattacgtcgtgggcgctcgcacctttcgccgtgaaaagcgggccgaacgcttgacctcacgggtgaaggccctcttctccgtgctgaactacgagagagcaagacggcctggcctgctgggagcttcggtgctgggactggacgatatccaccgggcttggcggacctttgttctccgggtgagagcccaagaccctccgccggaactgtacttcgtgaaggtggcgatcaccggagcctatgatactattccgcaagatcgactcaccgaagtcatcgcctcgatcatcaaaccgcagaacacttactgcgtcaggcggtacgccgtggtccagaaggccgcgcatggccacgtgagaaaggcgttcaagtcgcacgtgtccactctcaccgacctccagccttacatgaggcaattcgttgcgcatttgcaagagacttcgcccctgagagatgcggtggtcatcgagcagagctccagcctgaacgaagcgagcagcggtctgtttgacgtgttcctccgcttcatgtgtcatcacgcggtgcgaatcaggggaaaatcatacgtgcagtgccagggaatcccacaaggcagcattctgtcgactctcttgtgttccctttgctacggcgatatggaaaacaagctgttcgctgggatcagacgggacgggttgctgctcagactggtggacgacttcctgctggtgactccgcacctcactcacgccaaaacctttctccgcactctggtgaggggagtgccagaatacggctgtgtggtcaatctccggaaaactgtggtgaatttccctgtcgaggatgaggcactcggaggaaccgcatttgtccaaatgccagcacatggcctgttcccatggtgcggtctgctgctggacacccgaactcttgaagtgcagtccgactactccagctatgcccggacgagcatccgcgccagcctcactttcaatcgcggctttaaggccggacgaaacatgcgcagaaagcttttcggagtcctccggcttaaatgccattcgctctttctcgatctccaagtcaattcgctgcagaccgtgtgcacgaacatctacaagatcctgctgctccaagcctaccggttccacgcttgcgtgcttcagctgccgtttcaccaacaggtgtggaagaacccgaccttctttctgcgggtcattagcgatactgcctccctgtgttactcaatcctcaaggcaaagaacgccggaatgtcgctgggtgcgaaaggagccgcgggacctcttcctagcgaagcggtgcagtggctctgccaccaggctttcctcctgaagctgaccaggcacagagtgacctacgtcccgctgctgggctcgctgcgcactgcacagacccagctgtctagaaaactccccggcaccaccctgaccgctctggaagccgccgccaacccagcattgccgtcagatttcaagaccatcttggacggatccggcacaatcctgtctgagggcgccaccaacttcagcctgctgaaactggccggcgacgtggaactgaaccctggccctacccctggaacccagagccccttcttccttctgctgctgctgaccgtgctgactgtcgtgacaggctctggccacgccagctctacacctggcggcgagaaagagacaagcgccacccagagaagcagcgtgccaagcagcaccgagaagaacgccgtgtccatgaccagctccgtgctgagcagccactctcctggcagcggcagcagcacaacacagggccaggatgtgacactggcccctgccacagaacctgcctctggatctgccgccacctggggacaggacgtgacaagcgtgccagtgaccagacctgccctgggctctacaacaccccctgcccacgatgtgaccagcgcccctgataacaagcctgcccctggaagcacagcccctccagctcatggcgtgacctctgccccagataccagaccagccccaggatctacagccccacccgcacacggcgtgacaagtgcccctgacacaagacccgctccaggctctactgctcctcctgcccatggcgtgacaagcgctcccgatacaaggccagctcctggctccacagcaccaccagcacatggcgtgacatcagctcccgacactagacctgctcccggatcaaccgctccaccagctcacggcgtgaccagcgcacctgataccagacctgctctgggaagcaccgcccctcccgtgcacaatgtgacatctgcttccggcagcgccagcggctctgcctctacactggtgcacaacggcaccagcgccagagccacaacaaccccagccagcaagagcacccccttcagcatccctagccaccacagcgacacccctaccacactggccagccactccaccaagaccgatgcctctagcacccaccactccagcgtgccccctctgaccagcagcaaccacagcacaagcccccagctgtctaccggcgtctcattcttctttctgtccttccacatcagcaacctgcagttcaacagcagcctggaagatcccagcaccgactactaccaggaactgcagcgggatatcagcgagatgttcctgcaaatctacaagcagggcggcttcctgggcctgagcaacatcaagttcagacccggcagcgtggtggtgcagctgaccctggctttccgggaaggcaccatcaacgtgcacgacgtggaaacccagttcaaccagtacaagaccgaggccgccagccggtacaacctgaccatctccgatgtgtccgtgtccgacgtgcccttcccattctctgcccagtctggcgcaggcgtgccaggatggggaattgctctgctggtgctcgtgtgcgtgctggtggccctggccatcgtgtatctgattgccctggccgtgtgccagtgccggcggaagaattacggccagctggacatcttccccgccagagacacctaccaccccatgagcgagtaccccacataccacacccacggcagatacgtgccacccagctccaccgacagatccccctacgagaaagtgtctgccggcaacggcggcagctccctgagctacacaaatcctgccgtggccgctgcctccgccaacctgggatccggcagaatcttcaacgcccactacgccggctacttcgccgacctgctgatccacgacatcgagacaaaccctggccccgaatcgccaagcgcaccccctcatcggtggtgcatcccttggcaacgcctcctcctgaccgcctcactgctgactttctggaacccgccgaccaccgcaaagctgaccattgagagcactcccttcaacgtggctgaggggaaggaggtgctgctcctggtgcacaatctgccccagcacctgttcgggtactcctggtacaagggagaacgcgtggacgggaaccggcagatcataggctacgtcatcggaacccagcaggccacacccggtccagcgtacagcggccgggagattatctacccgaacgcctccctgctgatccaaaacatcatccagaacgacaccggtttctacactctgcacgtgattaagtcagatctggtcaacgaagaggccaccggccaattcagggtgtaccccgaactccctaagccgttcatcacctcgaacaacagcaacccggtcgaggatgaagatgcggtggccttgacgtgcgaacctgagatccagaacaccacctacttgtggtgggtgaacaatcagagcctgccagtctccccacgactccagctgtcgaacgacaacaggaccctgactttgctgtccgtgactcggaacgacgtgggcccttatgaatgcggtatccagaacaagctgtccgtggaccacagcgaccctgtgatcctgaacgtcctttacgggccggacgaccccaccatttccccgtcgtacacttactaccggccgggcgtgaacctgtccctgtcgtgccacgctgcctccaatccgccggcccagtactcctggctcatcgacggaaacatccagcagcacacccaagaactgttcatctccaacattaccgagaaaaactcgggactttacacctgtcaagccaacaattccgccagcggccactcccgcaccactgtcaaaactatcactgtgtccgccgaactcccgaagcccagcatcagctccaacaactcgaagcccgtggaggataaggacgctgtcgcgttcacctgtgaaccagaggcacagaataccacctacctttggtgggtcaacggacagtccctgcctgtctcaccgagactgcagctgtcaaacgggaataggactctgaccttgtttaacgtcacccggaacgacgcccgggcctacgtgtgcggcatccagaactccgtgagcgcaaaccggtctgacccagtgaccctggatgtgctgtacggccccgacactccgatcatttcaccccccgattcatcctacctgtccggcgctaacctcaacctctcatgccactccgcatccaaccccagcccgcaatattcgtggcgcattaacggaattcctcagcaacatacccaggtcctgttcattgcgaagatcacccctaacaacaacggaacctacgcctgctttgtgtcaaacctggccactggtagaaacaactccatcgtgaagtccattaccgtgtcggcgtccggaacttccccgggcctgagcgccggcgccaccgtgggaattatgatcggcgtgctcgtgggagtggccctgatctgaagatctgggccctaacaaaacaaaaagatggggttattccctaaacttcatgggttacgtaattggaagttgggggacattgccacaagatcatattgtacaaaagatcaaacactgttttagaaaacttcctgtaaacaggcctattgattggaaagtatgtcaaaggattgtgggtcttttgggctttgctgctccatttacacaatgtggatatcctgccttaatgcctttgtatgcatgtatacaagctaaacaggctttcactttctcgccaacttacaaggcctttctaagtaaacagtacatgaacctttaccccgttgctcggcaacggcctggtctgtgccaagtgtttgctgacgcaacccccactggctggggcttggccataggccatcagcgcatgcgtggaacctttgtggctcctctgccgatccatactgcggaactcctagccgcttgttttgctcgcagccggtctggagcaaagctcataggaactgacaattctgtcgtcctctcgcggaaatatacatcgtttcgatctacgtatgatctttttccctctgccaaaaattatggggacatcatgaagccccttgagcatctgacttctggctaataaaggaaatttattttcattgcaatagtgtgttggaattttttgtgtctctcactcggaaggaattctgcattaatgaatcggccaacgcgcggggagaggcggtttgcgtattgggcgctcttccgcttcctcgctcactgactcgctgcgctcggtcgttcggctgcggcgagcggtatcagctcactcaaaggcggtaatacggttatccacagaatcaggggataacgcaggaaagaacatgtgagcaaaaggccagcaaaaggccaggaaccgtaaaaaggccgcgttgctggcgtttttccataggctccgcccccctgacgagcatcacaaaaatcgacgctcaagtcagaggtggcgaaacccgacaggactataaagataccaggcgtttccccctggaagctccctcgtgcgctctcctgttccgaccctgccgcttaccggatacctgtccgcctttctcccttcgggaagcgtggcgctttctcatagctcacgctgtaggtatctcagttcggtgtaggtcgttcgctccaagctgggctgtgtgcacgaaccccccgttcagcccgaccgctgcgccttatccggtaactatcgtcttgagtccaacccggtaagacacgacttatcgccactggcagcagccactggtaacaggattagcagagcgaggtatgtaggcggtgctacagagttcttgaagtggtggcctaactacggctacactagaagaacagtatttggtatctgcgctctgctgaagccagttaccttcggaaaaagagttggtagctcttgatccggcaaacaaaccaccgctggtagcggtggtttttttgtttgcaagcagcagattacgcgcagaaaaaaaggatctcaagaagatcctttgatcttttctacggggtctgacgctcagtggaacgaaaactcacgttaagggattttggtcatgagattatcaaaaaggatcttcacctagatccttttaaattaaaaatgaagttttaaatcaatctaaagtatatatgagtaaacttggtctgacagttaccaatgcttaatcagtgaggcacctatctcagcgatctgtctatttcgttcatccatagttgcctgactc

SEQ ID NO: 62 - DNA, 36283 bp, Artificial Sequence
  Synthetic Construct
ccatcttcaataatatacctcaaactttttgtgcgcgttaatatgcaaatgaggcgtttgaatttggggaggaagggcggtgattggtcgagggatgagcgaccgttaggggcggggcgagtgacgttttgatgacgtggttgcgaggaggagccagtttgcaagttctcgtgggaaaagtgacgtcaaacgaggtgtggtttgaacacggaaatactcaattttcccgcgctctctgacaggaaatgaggtgtttctgggcggatgcaagtgaaaacgggccattttcgcgcgaaaactgaatgaggaagtgaaaatctgagtaatttcgcgtttatggcagggaggagtatttgccgagggccgagtagactttgaccgattacgtgggggtttcgattaccgtgtttttcacctaaatttccgcgtacggtgtcaaagtccggtgtttttactactgtaatagtaatcaattacggggtcattagttcatagcccatatatggagttccgcgttacataacttacggtaaatggcccgcctggctgaccgcccaacgacccccgcccattgacgtcaataatgacgtatgttcccatagtaacgccaatagggactttccattgacgtcaatgggtggagtatttacggtaaactgcccacttggcagtacatcaagtgtatcatatgccaagtacgccccctattgacgtcaatgacggtaaatggcccgcctggcattatgcccagtacatgaccttatgggactttcctacttggcagtacatctacgtattagtcatcgctattaccatggtgatgcggttttggcagtacatcaatgggcgtggatagcggtttgactcacggggatttccaagtctccaccccattgacgtcaatgggagtttgttttggcaccaaaatcaacgggactttccaaaatgtcgtaacaactccgccccattgacgcaaatgggcggtaggcgtgtacggtgggaggtctatataagcagagctgtccctatcagtgatagagatctccctatcagtgatagagagtttagtgaaccgtcagatccgctagggtaccgcgatcaccatggctagcggagctgccccggagccggagaggacccccgttggccagggatcgtgggcccatccgggacgcaccaggggaccatccgacaggggattctgtgtggtgtcaccggccaggccagcagaagaggcaaccagcctcgagggagcgttgtctggaaccagacattcccacccgtcggtgggccggcagcaccacgcgggaccaccgtccacttccagaccgccacggccatgggacaccccttgcccgcctgtgtatgccgagactaaacacttcctgtactcatccggagacaaggaacagcttcggccgtccttcctcctgtcgtcgctcagaccgagcctgaccggagcacgcagattggtggaaactatcttccttgggtcacgtccgtggatgccaggtaccccacggcgcctcccgcgcctcccacagagatactggcagatgcggcctctgttcctggaattgctgggaaaccacgctcagtgcccgtacggagtcctgctcaagactcactgccctctgagggcggcggtcactccggcggccggagtgtgcgcacgggagaagccccagggaagcgtggcagctccggaagaggaggacaccgatccgcgccgcctcgtgcaacttctgcgccagcactcctcgccctggcaagtctacgggttcgtccgcgcctgcctgcgccgcctggtgccgcctgggctctggggttcccggcataacgagcgccgcttcctgagaaatactaagaagtttatctcacttggaaaacatgccaagttgtcgctgcaagaactcacgtggaagatgtcagtccgcgattgcgcctggctgcgccgctcgccgggcgtcgggtgtgttccagctgcagaacaccgcctgagagaagaaattctggccaaatttctgcattggctgatgtcagtgtacgtggtcgagctgctgcgctcctttttctacgtcactgagactacctttcaaaagaaccgcctgttcttctaccgcaaatctgtgtggagcaagctgcagtcaatcggcattcgccagcatctgaagagggtgcagctgcgggaactttccgaggcagaagtccgccagcaccgggaggcccggccggcgcttctcacgtcgcgtctgagattcatcccaaagcccgacgggctgaggcctatcgtcaacatggattacgtcgtgggcgctcgcacctttcgccgtgaaaagcgggccgaacgcttgacctcacgggtgaaggccctcttctccgtgctgaactacgagagagcaagacggcctggcctgctgggagcttcggtgctgggactggacgatatccaccgggcttggcggacctttgttctccgggtgagagcccaagaccctccgccggaactgtacttcgtgaaggtggcgatcaccggagcctatgatactattccgcaagatcgactcaccgaagtcatcgcctcgatcatcaaaccgcagaacacttactgcgtcaggcggtacgccgtggtccagaaggccgcgcatggccacgtgagaaaggcgttcaagtcgcacgtgtccactctcaccgacctccagccttacatgaggcaattcgttgcgcatttgcaagagacttcgcccctgagagatgcggtggtcatcgagcagagctccagcctgaacgaagcgagcagcggtctgtttgacgtgttcctccgcttcatgtgtcatcacgcggtgcgaatcaggggaaaatcatacgtgcagtgccagggaatcccacaaggcagcattctgtcgactctcttgtgttccctttgctacggcgatatggaaaacaagctgttcgctgggatcagacgggacgggttgctgctcagactggtggacgacttcctgctggtgactccgcacctcactcacgccaaaacctttctccgcactctggtgaggggagtgccagaatacggctgtgtggtcaatctccggaaaactgtggtgaatttccctgtcgaggatgaggcactcggaggaaccgcatttgtccaaatgccagcacatggcctgttcccatggtgcggtctgctgctggacacccgaactcttgaagtgcagtccgactactccagctatgcccggacgagcatccgcgccagcctcactttcaatcgcggctttaaggccggacgaaacatgcgcagaaagcttttcggagtcctccggcttaaatgccattcgctctttctcgatctccaagtcaattcgctgcagaccgtgtgcacgaacatctacaagatcctgctgctccaagcctaccggttccacgcttgcgtgcttcagctgccgtttcaccaacaggtgtggaagaacccgaccttctttctgcgggtcattagcgatactgcctccctgtgttactcaatcctcaaggcaaagaacgccggaatgtcgctgggtgcgaaaggagccgcgggacctcttcctagcgaagcggtgcagtggctctgccaccaggctttcctcctgaagctgaccaggcacagagtgacctacgtcccgctgctgggctcgctgcgcactgcacagacccagctgtctagaaaactccccggcaccaccctgaccgctctggaagccgccgccaacccagcattgccgtcagatttcaagaccatcttggacggatccggcacaatcctgtctgagggcgccaccaacttcagcctgctgaaactggccggcgacgtggaactgaaccctggccctacccctggaacccagagccccttcttccttctgctgctgctgaccgtgctgactgtcgtgacaggctctggccacgccagctctacacctggcggcgagaaagagacaagcgccacccagagaagcagcgtgccaagcagcaccgagaagaacgccgtgtccatgaccagctccgtgctgagcagccactctcctggcagcggcagcagcacaacacagggccaggatgtgacactggcccctgccacagaacctgcctctggatctgccgccacctggggacaggacgtgacaagcgtgccagtgaccagacctgccctgggctctacaacaccccctgcccacgatgtgaccagcgcccctgataacaagcctgcccctggaagcacagcccctccagctcatggcgtgacctctgccccagataccagaccagccccaggatctacagccccacccgcacacggcgtgacaagtgcccctgacacaagacccgctccaggctctactgctcctcctgcccatggcgtgacaagcgctcccgatacaaggccagctcctggctccacagcaccaccagcacatggcgtgacatcagctcccgacactagacctgctcccggatcaaccgctccaccagctcacggcgtgaccagcgcacctgataccagacctgctctgggaagcaccgcccctcccgtgcacaatgtgacatctgcttccggcagcgccagcggctctgcctctacactggtgcacaacggcaccagcgccagagccacaacaaccccagccagcaagagcacccccttcagcatccctagccaccacagcgacacccctaccacactggccagccactccaccaagaccgatgcctctagcacccaccactccagcgtgccccctctgaccagcagcaaccacagcacaagcccccagctgtctaccggcgtctcattcttctttctgtccttccacatcagcaacctgcagttcaacagcagcctggaagatcccagcaccgactactaccaggaactgcagcgggatatcagcgagatgttcctgcaaatctacaagcagggcggcttcctgggcctgagcaacatcaagttcagacccggcagcgtggtggtgcagctgaccctggctttccgggaaggcaccatcaacgtgcacgacgtggaaacccagttcaaccagtacaagaccgaggccgccagccggtacaacctgaccatctccgatgtgtccgtgtccgacgtgcccttcccattctctgcccagtctggcgcaggcgtgccaggatggggaattgctctgctggtgctcgtgtgcgtgctggtggccctggccatcgtgtatctgattgccctggccgtgtgccagtgccggcggaagaattacggccagctggacatcttccccgccagagacacctaccaccccatgagcgagtaccccacataccacacccacggcagatacgtgccacccagctccaccgacagatccccctacgagaaagtgtctgccggcaacggcggcagctccctgagctacacaaatcctgccgtggccgctgcctccgccaacctgggatccggcagaatcttcaacgcccactacgccggctacttcgccgacctgctgatccacgacatcgagacaaaccctggccccgaatcgccaagcgcaccccctcatcggtggtgcatcccttggcaacgcctcctcctgaccgcctcactgctgactttctggaacccgccgaccaccgcaaagctgaccattgagagcactcccttcaacgtggctgaggggaaggaggtgctgctcctggtgcacaatctgccccagcacctgttcgggtactcctggtacaagggagaacgcgtggacgggaaccggcagatcataggctacgtcatcggaacccagcaggccacacccggtccagcgtacagcggccgggagattatctacccgaacgcctccctgctgatccaaaacatcatccagaacgacaccggtttctacactctgcacgtgattaagtcagatctggtcaacgaagaggccaccggccaattcagggtgtaccccgaactccctaagccgttcatcacctcgaacaacagcaacccggtcgaggatgaagatgcggtggccttgacgtgcgaacctgagatccagaacaccacctacttgtggtgggtgaacaatcagagcctgccagtctccccacgactccagctgtcgaacgacaacaggaccctgactttgctgtccgtgactcggaacgacgtgggcccttatgaatgcggtatccagaacaagctgtccgtggaccacagcgaccctgtgatcctgaacgtcctttacgggccggacgaccccaccatttccccgtcgtacacttactaccggccgggcgtgaacctgtccctgtcgtgccacgctgcctccaatccgccggcccagtactcctggctcatcgacggaaacatccagcagcacacccaagaactgttcatctccaacattaccgagaaaaactcgggactttacacctgtcaagccaacaattccgccagcggccactcccgcaccactgtcaaaactatcactgtgtccgccgaactcccgaagcccagcatcagctccaacaactcgaagcccgtggaggataaggacgctgtcgcgttcacctgtgaaccagaggcacagaataccacctacctttggtgggtcaacggacagtccctgcctgtctcaccgagactgcagctgtcaaacgggaataggactctgaccttgtttaacgtcacccggaacgacgcccgggcctacgtgtgcggcatccagaactccgtgagcgcaaaccggtctgacccagtgaccctggatgtgctgtacggccccgacactccgatcatttcaccccccgattcatcctacctgtccggcgctaacctcaacctctcatgccactccgcatccaaccccagcccgcaatattcgtggcgcattaacggaattcctcagcaacatacccaggtcctgttcattgcgaagatcacccctaacaacaacggaacctacgcctgctttgtgtcaaacctggccactggtagaaacaactccatcgtgaagtccattaccgtgtcggcgtccggaacttccccgggcctgagcgccggcgccaccgtgggaattatgatcggcgtgctcgtgggagtggccctgatctgacgcacctcgagctgatcataatcagccataccacatttgtagaggttttacttgctttaaaaaacctcccacacctccccctgaacctgaaacataaaatgaatgcaattgttgttgttaacttgtttattgcagcttataatggttacaaataaagcaatagcatcacaaatttcacaaataaagcatttttttcactgcattctagttgtggtttgtccaaactcatcaatgtatcttaccaggtgccgagcctgcgagtgcggagggaagcatgccaggttccagcccgtgtgtgtggatgtgacggaggacctgcgacccgatcatttggtgttgccctgcaccgggacggagttcggttccagcggggaagaatctgactagagtgagtagtgttctggggcgggggaggacctgcatgagggccagaataactgaaatctgtgcttttctgtgtgttgcagcagcatgagcggaagcggctcctttgagggaggggtattcagcccttatctgacggggcgtctcccctcctgggcgggagtgcgtcagaatgtgatgggatccacggtggacggccggcccgtgcagcccgcgaactcttcaaccctgacctatgcaaccctgagctcttcgtcgttggacgcagctgccgccgcagctgctgcatctgccgccagcgccgtgcgcggaatggccatgggcgccggctactacggcactctggtggccaactcgagttccaccaataatcccgccagcctgaacgaggagaagctgttgctgctgatggcccagctcgaggccttgacccagcgcctgggcgagctgacccagcaggtggctcagctgcaggagcagacgcgggccgcggttgccacggtgaaatccaaataaaaaatgaatcaataaataaacggagacggttgttgattttaacacagagtctgaatctttatttgatttttcgcgcgcggtaggccctggaccaccggtctcgatcattgagcacccggtggatcttttccaggacccggtagaggtgggcttggatgttgaggtacatgggcatgagcccgtcccgggggtggaggtagctccattgcagggcctcgtgctcgggggtggtgttgtaaatcacccagtcatagcaggggcgcagggcatggtgttgcacaatatctttgaggaggagactgatggccacgggcagccctttggtgtaggtgtttacaaatctgttgagctgggagggatgcatgcggggggagatgaggtgcatcttggcctggatcttgagattggcgatgttaccgcccagatcccgcctggggttcatgttgtgcaggaccaccagcacggtgtatccggtgcacttggggaatttatcatgcaacttggaagggaaggcgtgaaagaatttggcgacgcctttgtgcccgcccaggttttccatgcactcatccatgatgatggcgatgggcccgtgggcggcggcctgggcaaagacgtttcgggggtcggacacatcatagttgtggtcctgggtgaggtcatcataggccattttaatgaatttggggcggagggtgccggactgggggacaaaggtaccctcgatcccgggggcgtagttcccctcacagatctgcatctcccaggctttgagctcggagggggggatcatgtccacctgcggggcgataaagaacacggtttccggggcgggggagatgagctgggccgaaagcaagttccggagcagctgggacttgccgcagccggtggggccgtagatgaccccgatgaccggctgcaggtggtagttgagggagagacagctgccgtcctcccggaggaggggggccacctcgttcatcatctcgcgcacgtgcatgttctcgcgcaccagttccgccaggaggcgctctccccccagggataggagctcctggagcgaggcgaagtttttcagcggcttgagtccgtcggccatgggcattttggagagggtttgttgcaagagttccaggcggtcccagagctcggtgatgtgctctacggcatctcgatccagcagacctcctcgtttcgcgggttgggacggctgcgggagtagggcaccagacgatgggcgtccagcgcagccagggtccggtccttccagggtcgcagcgtccgcgtcagggtggtctccgtcacggtgaaggggtgcgcgccgggctgggcgcttgcgagggtgcgcttcaggctcatccggctggtcgaaaaccgctcccgatcggcgccctgcgcgtcggccaggtagcaattgaccatgagttcgtagttgagcgcctcggccgcgtggcctttggcgcggagcttacctttggaagtctgcccgcaggcgggacagaggagggacttgagggcgtagagcttgggggcgaggaagacggactcgggggcgtaggcgtccgcgccgcagtgggcgcagacggtctcgcactccacgagccaggtgaggtcgggctggtcggggtcaaaaaccagtttcccgccgttctttttgatgcgtttcttacctttggtctccatgagctcgtgtccccgctgggtgacaaagaggctgtccgtgtccccgtagaccgactttatgggccggtcctcgagcggtgtgccgcggtcctcctcgtagaggaaccccgcccactccgagacgaaagcccgggtccaggccagcacgaaggaggccacgtgggacgggtagcggtcgttgtccaccagcgggtccaccttttccagggtatgcaaacacatgtccccctcgtccacatccaggaaggtgattggcttgtaagtgtaggccacgtgaccgggggtcccggccgggggggtataaaagggtgcgggtccctgctcgtcctcactgtcttccggatcgctgtccaggagcgccagctgttggggtaggtattccctctcgaaggcgggcatgacctcggcactcaggttgtcagtttctagaaacgaggaggatttgatattgacggtgccggcggagatgcctttcaagagcccctcgtccatctggtcagaaaagacgatctttttgttgtcgagcttggtggcgaaggagccgtagagggcgttggagaggagcttggcgatggagcgcatggtctggtttttttccttgtcggcgcgctccttggcggcgatgttgagctgcacgtactcgcgcgccacgcacttccattcggggaagacggtggtcagctcgtcgggcacgattctgacctgccagccccgattatgcagggtgatgaggtccacactggtggccacctcgccgcgcaggggctcattagtccagcagaggcgtccgcccttgcgcgagcagaaggggggcagggggtccagcatgacctcgtcgggggggtcggcatcgatggtgaagatgccgggcaggaggtcggggtcaaagtagctgatggaagtggccagatcgtccagggcagcttgccattcgcgcacggccagcgcgcgctcgtagggactgaggggcgtgccccagggcatgggatgggtaagcgcggaggcgtacatgccgcagatgtcgtagacgtagaggggctcctcgaggatgccgatgtaggtggggtagcagcgccccccgcggatgctggcgcgcacgtagtcatacagctcgtgcgagggggcgaggagccccgggcccaggttggtgcgactgggcttttcggcgcggtagacgatctggcggaaaatggcatgcgagttggaggagatggtgggcctttggaagatgttgaagtgggcgtggggcagtccgaccgagtcgcggatgaagtgggcgtaggagtcttgcagcttggcgacgagctcggcggtgactaggacgtccagagcgcagtagtcgagggtctcctggatgatgtcatacttgagctgtcccttttgtttccacagctcgcggttgagaaggaactcttcgcggtccttccagtactcttcgagggggaacccgtcctgatctgcacggtaagagcctagcatgtagaactggttgacggccttgtaggcgcagcagcccttctccacggggagggcgtaggcctgggcggccttgcgcagggaggtgtgcgtgagggcgaaagtgtccctgaccatgaccttgaggaactggtgcttgaagtcgatatcgtcgcagcccccctgctcccagagctggaagtccgtgcgcttcttgtaggcggggttgggcaaagcgaaagtaacatcgttgaagaggatcttgcccgcgcggggcataaagttgcgagtgatgcggaaaggttggggcacctcggcccggttgttgatgacctgggcggcgagcacgatctcgtcgaagccgttgatgttgtggcccacgatgtagagttccacgaatcgcggacggcccttgacgtggggcagtttcttgagctcctcgtaggtgagctcgtcggggtcgctgagcccgtgctgctcgagcgcccagtcggcgagatgggggttggcgcggaggaaggaagtccagagatccacggccagggcggtttgcagacggtcccggtactgacggaactgctgcccgacggccattttttcgggggtgacgcagtagaaggtgcgggggtccccgtgccagcgatcccatttgagctggagggcgagatcgagggcgagctcgacgagccggtcgtccccggagagtttcatgaccagcatgaaggggacgagctgcttgccgaaggaccccatccaggtgtaggtttccacatcgtaggtgaggaagagcctttcggtgcgaggatgcgagccgatggggaagaactggatctcctgccaccaattggaggaatggctgttgatgtgatggaagtagaaatgccgacggcgcgccgaacactcgtgcttgtgtttatacaagcggccacagtgctcgcaacgctgcacgggatgcacgtgctgcacgagctgtacctgagttcctttgacgaggaatttcagtgggaagtggagtcgtggcgcctgcatctcgtgctgtactacgtcgtggtggtcggcctggccctcttctgcctcgatggtggtcatgctgacgagcccgcgcgggaggcaggtccagacctcggcgcgagcgggtcggagagcgaggacgagggcgcgcaggccggagctgtccagggtcctgagacgctgcggagtcaggtcagtgggcagcggcggcgcgcggttgacttgcaggagtttttccagggcgcgcgggaggtccagatggtacttgatctccaccgcgccattggtggcgacgtcgatggcttgcagggtcccgtgcccctggggtgtgaccaccgtcccccgtttcttcttgggcggctggggcgacgggggcggtgcctcttccatggttagaagcggcggcgaggacgcgcgccgggcggcaggggcggctcggggcccggaggcaggggcggcaggggcacgtcggcgccgcgcgcgggtaggttctggtactgcgcccggagaagactggcgtgagcgacgacgcgacggttgacgtcctggatctgacgcctctgggtgaaggccacgggacccgtgagtttgaacctgaaagagagttcgacagaatcaatctcggtatcgttgacggcggcctgccgcaggatctcttgcacgtcgcccgagttgtcctggtaggcgatctcggtcatgaactgctcgatctcctcctcttgaaggtctccgcggccggcgcgctccacggtggccgcgaggtcgttggagatgcggcccatgagctgcgagaaggcgttcatgcccgcctcgttccagacgcggctgtagaccacgacgccctcgggatcgcgggcgcgcatgaccacctgggcgaggttgagctccacgtggcgcgtgaagaccgcgtagttgcagaggcgctggtagaggtagttgagcgtggtggcgatgtgctcggtgacgaagaaatacatgatccagcggcggagcggcatctcgctgacgtcgcccagcgcctccaaacgttccatggcctcgtaaaagtccacggcgaagttgaaaaactgggagttgcgcgccgagacggtcaactcctcctccagaagacggatgagctcggcgatggtggcgcgcacctcgcgctcgaaggcccccgggagttcctccacttcctcttcttcctcctccactaacatctcttctacttcctcctcaggcggcagtggtggcgggggagggggcctgcgtcgccggcggcgcacgggcagacggtcgatgaagcgctcgatggtctcgccgcgccggcgtcgcatggtctcggtgacggcgcgcccgtcctcgcggggccgcagcgtgaagacgccgccgcgcatctccaggtggccgggggggtccccgttgggcagggagagggcgctgacgatgcatcttatcaattgccccgtagggactccgcgcaaggacctgagcgtctcgagatccacgggatctgaaaaccgctgaacgaaggcttcgagccagtcgcagtcgcaaggtaggctgagcacggtttcttctggcgggtcatgttggttgggagcggggcgggcgatgctgctggtgatgaagttgaaataggcggttctgagacggcggatggtggcgaggagcaccaggtctttgggcccggcttgctggatgcgcagacggtcggccatgccccaggcgtggtcctgacacctggccaggtccttgtagtagtcctgcatgagccgctccacgggcacctcctcctcgcccgcgcggccgtgcatgcgcgtgagcccgaagccgcgctggggctggacgagcgccaggtcggcgacgacgcgctcggcgaggatggcttgctggatctgggtgagggtggtctggaagtcatcaaagtcgacgaagcggtggtaggctccggtgttgatggtgtaggagcagttggccatgacggaccagttgacggtctggtggcccggacgcacgagctcgtggtacttgaggcgcgagtaggcgcgcgtgtcgaagatgtagtcgttgcaggtgcgcaccaggtactggtagccgatgaggaagtgcggcggcggctggcggtagagcggccatcgctcggtggcgggggcgccgggcgcgaggtcctcgagcatggtgcggtggtagccgtagatgtacctggacatccaggtgatgccggcggcggtggtggaggcgcgcgggaactcgcggacgcggttccagatgttgcgcagcggcaggaagtagttcatggtgggcacggtctggcccgtgaggcgcgcgcagtcgtggatgctctatacgggcaaaaacgaaagcggtcagcggctcgactccgtggcctggaggctaagcgaacgggttgggctgcgcgtgtaccccggttcgaatctcgaatcaggctggagccgcagctaacgtggtattggcactcccgtctcgacccaagcctgcaccaaccctccaggatacggaggcgggtcgttttgcaacttttttttggaggccggatgagactagtaagcgcggaaagcggccgaccgcgatggctcgctgccgtagtctggagaagaatcgccagggttgcgttgcggtgtgccccggttcgaggccggccggattccgcggctaacgagggcgtggctgccccgtcgtttccaagaccccatagccagccgacttctccagttacggagcgagcccctcttttgttttgtttgtttttgccagatgcatcccgtactgcggcagatgcgcccccaccaccctccaccgcaacaacagccccctccacagccggcgcttctgcccccgccccagcagcaacttccagccacgaccgccgcggccgccgtgagcggggctggacagagttatgatcaccagctggccttggaagagggcgaggggctggcgcgcctgggggcgtcgtcgccggagcggcacccgcgcgtgcagatgaaaagggacgctcgcgaggcctacgtgcccaagcagaacctgttcagagacaggagcggcgaggagcccgaggagatgcgcgcggcccggttccacgcggggcgggagctgcggcgcggcctggaccgaaagagggtgctgagggacgaggatttcgaggcggacgagctgacggggatcagccccgcgcgcgcgcacgtggccgcggccaacctggtcacggcgtacgagcagaccgtgaaggaggagagcaacttccaaaaatccttcaacaaccacgtgcgcaccctgatcgcgcgcgaggaggtgaccctgggcctgatgcacctgtgggacctgctggaggccatcgtgcagaaccccaccagcaagccgctgacggcgcagctgttcctggtggtgcagcatagtcgggacaacgaagcgttcagggaggcgctgctgaatatcaccgagcccgagggccgctggctcctggacctggtgaacattctgcagagcatcgtggtgcaggagcgcgggctgccgctgtccgagaagctggcggccatcaacttctcggtgctgagtttgggcaagtactacgctaggaagatctacaagaccccgtacgtgcccatagacaaggaggtgaagatcgacgggttttacatgcgcatgaccctgaaagtgctgaccctgagcgacgatctgggggtgtaccgcaacgacaggatgcaccgtgcggtgagcgccagcaggcggcgcgagctgagcgaccaggagctgatgcatagtctgcagcgggccctgaccggggccgggaccgagggggagagctactttgacatgggcgcggacctgcactggcagcccagccgccgggccttggaggcggcggcaggaccctacgtagaagaggtggacgatgaggtggacgaggagggcgagtacctggaagactgatggcgcgaccgtatttttgctagatgcaacaacaacagccacctcctgatcccgcgatgcgggcggcgctgcagagccagccgtccggcattaactcctcggacgattggacccaggccatgcaacgcatcatggcgctgacgacccgcaaccccgaagcctttagacagcagccccaggccaaccggctctcggccatcctggaggccgtggtgccctcgcgctccaaccccacgcacgagaaggtcctggccatcgtgaacgcgctggtggagaacaaggccatccgcggcgacgaggccggcctggtgtacaacgcgctgctggagcgcgtggcccgctacaacagcaccaacgtgcagaccaacctggaccgcatggtgaccgacgtgcgcgaggccgtggcccagcgcgagcggttccaccgcgagtccaacctgggatccatggtggcgctgaacgccttcctcagcacccagcccgccaacgtgccccggggccaggaggactacaccaacttcatcagcgccctgcgcctgatggtgaccgaggtgccccagagcgaggtgtaccagtccgggccggactacttcttccagaccagtcgccagggcttgcagaccgtgaacctgagccaggctttcaagaacttgcagggcctgtggggcgtgcaggccccggtcggggaccgcgcgacggtgtcgagcctgctgacgccgaactcgcgcctgctgctgctgctggtggcccccttcacggacagcggcagcatcaaccgcaactcgtacctgggctacctgattaacctgtaccgcgaggccatcggccaggcgcacgtggacgagcagacctaccaggagatcacccacgtgagccgcgccctgggccaggacgacccgggcaacctggaagccaccctgaactttttgctgaccaaccggtcgcagaagatcccgccccagtacgcgctcagcaccgaggaggagcgcatcctgcgttacgtgcagcagagcgtgggcctgttcctgatgcaggagggggccacccccagcgccgcgctcgacatgaccgcgcgcaacatggagcccagcatgtacgccagcaaccgcccgttcatcaataaactgatggactacttgcatcgggcggccgccatgaactctgactatttcaccaacgccatcctgaatccccactggctcccgccgccggggttctacacgggcgagtacgacatgcccgaccccaatgacgggttcctgtgggacgatgtggacagcagcgtgttctccccccgaccgggtgctaacgagcgccccttgtggaagaaggaaggcagcgaccgacgcccgtcctcggcgctgtccggccgcgagggtgctgccgcggcggtgcccgaggccgccagtcctttcccgagcttgcccttctcgctgaacagtatccgcagcagcgagctgggcaggatcacgcgcccgcgcttgctgggcgaagaggagtacttgaatgactcgctgttgagacccgagcgggagaagaacttccccaataacgggatagaaagcctggtggacaagatgagccgctggaagacgtatgcgcaggagcacagggacgatccccgggcgtcgcagggggccacgagccggggcagcgccgcccgtaaacgccggtggcacgacaggcagcggggacagatgtgggacgatgaggactccgccgacgacagcagcgtgttggacttgggtgggagtggtaacccgttcgctcacctgcgcccccgtatcgggcgcatgatgtaagagaaaccgaaaataaatgatactcaccaaggccatggcgaccagcgtgcgttcgtttcttctctgttgttgttgtatctagtatgatgaggcgtgcgtacccggagggtcctcctccctcgtacgagagcgtgatgcagcaggcgatggcggcggcggcgatgcagcccccgctggaggctccttacgtgcccccgcggtacctggcgcctacggaggggcggaacagcattcgttactcggagctggcacccttgtacgataccacccggttgtacctggtggacaacaagtcggcggacatcgcctcgctgaactaccagaacgaccacagcaacttcctgaccaccgtggtgcagaacaatgacttcacccccacggaggccagcacccagaccatcaactttgacgagcgctcgcggtggggcggccagctgaaaaccatcatgcacaccaacatgcccaacgtgaacgagttcatgtacagcaacaagttcaaggcgcgggtgatggtctcccgcaagacccccaatggggtgacagtgacagaggattatgatggtagtcaggatgagctgaagtatgaatgggtggaatttgagctgcccgaaggcaacttctcggtgaccatgaccatcgacctgatgaacaacgccatcatcgacaattacttggcggtggggcggcagaacggggtgctggagagcgacatcggcgtgaagttcgacactaggaacttcaggctgggctgggaccccgtgaccgagctggtcatgcccggggtgtacaccaacgaggctttccatcccgatattgtcttgctgcccggctgcggggtggacttcaccgagagccgcctcagcaacctgctgggcattcgcaagaggcagcccttccaggaaggcttccagatcatgtacgaggatctggaggggggcaacatccccgcgctcctggatgtcgacgcctatgagaaaagcaaggaggatgcagcagctgaagcaactgcagccgtagctaccgcctctaccgaggtcaggggcgataattttgcaagcgccgcagcagtggcagcggccgaggcggctgaaaccgaaagtaagatagtcattcagccggtggagaaggatagcaagaacaggagctacaacgtactaccggacaagataaacaccgcctaccgcagctggtacctagcctacaactatggcgaccccgagaagggcgtgcgctcctggacgctgctcaccacctcggacgtcacctgcggcgtggagcaagtctactggtcgctgcccgacatgatgcaagacccggtcaccttccgctccacgcgtcaagttagcaactacccggtggtgggcgccgagctcctgcccgtctactccaagagcttcttcaacgagcaggccgtctactcgcagcagctgcgcgccttcacctcgcttacgcacgtcttcaaccgcttccccgagaaccagatcctcgtccgcccgcccgcgcccaccattaccaccgtcagtgaaaacgttcctgctctcacagatcacgggaccctgccgctgcgcagcagtatccggggagtccagcgcgtgaccgttactgacgccagacgccgcacctgcccctacgtctacaaggccctgggcatagtcgcgccgcgcgtcctctcgagccgcaccttctaaatgtccattctcatctcgcccagtaataacaccggttggggcctgcgcgcgcccagcaagatgtacggaggcgctcgccaacgctccacgcaacaccccgtgcgcgtgcgcgggcacttccgcgctccctggggcgccctcaagggccgcgtgcggtcgcgcaccaccgtcgacgacgtgatcgaccaggtggtggccgacgcgcgcaactacacccccgccgccgcgcccgtctccaccgtggacgccgtcatcgacagcgtggtggccgacgcgcgccggtacgcccgcgccaagagccggcggcggcgcatcgcccggcggcaccggagcacccccgccatgcgcgcggcgcgagccttgctgcgcagggccaggcgcacgggacgcagggccatgctcagggcggccagacgcgcggcttcaggcgccagcgccggcaggacccggagacgcgcggccacggcggcggcagcggccatcgccagcatgtcccgcccgcggcgagggaacgtgtactgggtgcgcgacgccgccaccggtgtgcgcgtgcccgtgcgcacccgcccccctcgcacttgaagatgttcacttcgcgatgttgatgtgtcccagcggcgaggaggatgtccaagcgcaaattcaaggaagagatgctccaggtcatcgcgcctgagatctacggccctgcggtggtgaaggaggaaagaaagccccgcaaaatcaagcgggtcaaaaaggacaaaaaggaagaagaaagtgatgtggacggattggtggagtttgtgcgcgagttcgccccccggcggcgcgtgcagtggcgcgggcggaaggtgcaaccggtgctgagacccggcaccaccgtggtcttcacgcccggcgagcgctccggcaccgcttccaagcgctcctacgacgaggtgtacggggatgatgatattctggagcaggcggccgagcgcctgggcgagtttgcttacggcaagcgcagccgttccgcaccgaaggaagaggcggtgtccatcccgctggaccacggcaaccccacgccgagcctcaagcccgtgaccttgcagcaggtgctgccgaccgcggcgccgcgccgggggttcaagcgcgagggcgaggatctgtaccccaccatgcagctgatggtgcccaagcgccagaagctggaagacgtgctggagaccatgaaggtggacccggacgtgcagcccgaggtcaaggtgcggcccatcaagcaggtggccccgggcctgggcgtgcagaccgtggacatcaagattcccacggagcccatggaaacgcagaccgagcccatgatcaagcccagcaccagcaccatggaggtgcagacggatccctggatgccatcggctcctagtcgaagaccccggcgcaagtacggcgcggccagcctgctgatgcccaactacgcgctgcatccttccatcatccccacgccgggctaccgcggcacgcgcttctaccgcggtcataccagcagccgccgccgcaagaccaccactcgccgccgccgtcgccgcaccgccgctgcaaccacccctgccgccctggtgcggagagtgtaccgccgcggccgcgcacctctgaccctgccgcgcgcgcgctaccacccgagcatcgccatttaaactttcgcctgctttgcagatcaatggccctcacatgccgccttcgcgttcccattacgggctaccgaggaagaaaaccgcgccgtagaaggctggcggggaacgggatgcgtcgccaccaccaccggcggcggcgcgccatcagcaagcggttggggggaggcttcctgcccgcgctgatccccatcatcgccgcggcgatcggggcgatccccggcattgcttccgtggcggtgcaggcctctcagcgccactgagacacacttggaaacatcttgtaataaaccaatggactctgacgctcctggtcctgtgatgtgttttcgtagacagatggaagacatcaatttttcgtccctggctccgcgacacggcacgcggccgttcatgggcacctggagcgacatcggcaccagccaactgaacgggggcgccttcaattggagcagtctctggagcgggcttaagaatttcgggtccacgcttaaaacctatggcagcaaggcgtggaacagcaccacagggcaggcgctgagggataagctgaaagagcagaacttccagcagaaggtggtcgatgggctcgcctcgggcatcaacggggtggtggacctggccaaccaggccgtgcagcggcagatcaacagccgcctggacccggtgccgcccgccggctccgtggagatgccgcaggtggaggaggagctgcctcccctggacaagcggggcgagaagcgaccccgccccgatgcggaggagacgctgctgacgcacacggacgagccgcccccgtacgaggaggcggtgaaactgggtctgcccaccacgcggcccatcgcgcccctggccaccggggtgctgaaacccgaaaagcccgcgaccctggacttgcctcctccccagccttcccgcccctctacagtggctaagcccctgccgccggtggccgtggcccgcgcgcgacccgggggcaccgcccgccctcatgcgaactggcagagcactctgaacagcatcgtgggtctgggagtgcagagtgtgaagcgccgccgctgctattaaacctaccgtagcgcttaacttgcttgtctgtgtgtgtatgtattatgtcgccgccgccgctgtccaccagaaggaggagtgaagaggcgcgtcgccgagttgcaagatggccaccccatcgatgctgccccagtgggcgtacatgcacatcgccggacaggacgcttcggagtacctgagtccgggtctggtgcagtttgcccgcgccacagacacctacttcagtctggggaacaagtttaggaaccccacggtggcgcccacgcacgatgtgaccaccgaccgcagccagcggctgacgctgcgcttcgtgcccgtggaccgcgaggacaacacctactcgtacaaagtgcgctacacgctggccgtgggcgacaaccgcgtgctggacatggccagcacctactttgacatccgcggcgtgctggatcggggccctagcttcaaaccctactccggcaccgcctacaacagtctggcccccaagggagcacccaacacttgtcagtggacatataaagccgatggtgaaactgccacagaaaaaacctatacatatggaaatgcacccgtgcagggcattaacatcacaaaagatggtattcaacttggaactgacaccgatgatcagccaatctacgcagataaaacctatcagcctgaacctcaagtgggtgatgctgaatggcatgacatcactggtactgatgaaaagtatggaggcagagctcttaagcctgataccaaaatgaagccttgttatggttcttttgccaagcctactaataaagaaggaggtcaggcaaatgtgaaaacaggaacaggcactactaaagaatatgacatagacatggctttctttgacaacagaagtgcggctgctgctggcctagctccagaaattgttttgtatactgaaaatgtggatttggaaactccagatacccatattgtatacaaagcaggcacagatgacagcagctcttctattaatttgggtcagcaagccatgcccaacagacctaactacattggtttcagagacaactttatcgggctcatgtactacaacagcactggcaatatgggggtgctggccggtcaggcttctcagctgaatgctgtggttgacttgcaagacagaaacaccgagctgtcctaccagctcttgcttgactctctgggtgacagaacccggtatttcagtatgtggaatcaggcggtggacagctatgatcctgatgtgcgcattattgaaaatcatggtgtggaggatgaacttcccaactattgtttccctctggatgctgttggcagaacagatacttatcagggaattaaggctaatggaactgatcaaaccacatggaccaaagatgacagtgtcaatgatgctaatgagataggcaagggtaatccattcgccatggaaatcaacatccaagccaacctgtggaggaacttcctctacgccaacgtggccctgtacctgcccgactcttacaagtacacgccggccaatgttaccctgcccaccaacaccaacacctacgattacatgaacggccgggtggtggcgccctcgctggtggactcctacatcaacatcggggcgcgctggtcgctggatcccatggacaacgtgaaccccttcaaccaccaccgcaatgcggggctgcgctaccgctccatgctcctgggcaacgggcgctacgtgcccttccacatccaggtgccccagaaatttttcgccatcaagagcctcctgctcctgcccgggtcctacacctacgagtggaacttccgcaaggacgtcaacatgatcctgcagagctccctcggcaacgacctgcgcacggacggggcctccatctccttcaccagcatcaacctctacgccaccttcttccccatggcgcacaacacggcctccacgctcgaggccatgctgcgcaacgacaccaacgaccagtccttcaacgactacctctcggcggccaacatgctctaccccatcccggccaacgccaccaacgtgcccatctccatcccctcgcgcaactgggccgccttccgcggctggtccttcacgcgtctcaagaccaaggagacgccctcgctgggctccgggttcgacccctacttcgtctactcgggctccatcccctacctcgacggcaccttctacctcaaccacaccttcaagaaggtctccatcaccttcgactcctccgtcagctggcccggcaacgaccggctcctgacgcccaacgagttcgaaatcaagcgcaccgtcgacggcgagggctacaacgtggcccagtgcaacatgaccaaggactggttcctggtccagatgctggcccactacaacatcggctaccagggcttctacgtgcccgagggctacaaggaccgcatgtactccttcttccgcaacttccagcccatgagccgccaggtggtggacgaggtcaactacaaggactaccaggccgtcaccctggcctaccagcacaacaactcgggcttcgtcggctacctcgcgcccaccatgcgccagggccagccctaccccgccaactacccctacccgctcatcggcaagagcgccgtcaccagcgtcacccagaaaaagttcctctgcgacagggtcatgtggcgcatccccttctccagcaacttcatgtccatgggcgcgctcaccgacctcggccagaacatgctctatgccaactccgcccacgcgctagacatgaatttcgaagtcgaccccatggatgagtccacccttctctatgttgtcttcgaagtcttcgacgtcgtccgagtgcaccagccccaccgcggcgtcatcgaggccgtctacctgcgcacccccttctcggccggtaacgccaccacctaagctcttgcttcttgcaagccatggccgcgggctccggcgagcaggagctcagggccatcatccgcgacctgggctgcgggccctacttcctgggcaccttcgataagcgcttcccgggattcatggccccgcacaagctggcctgcgccatcgtcaacacggccggccgcgagaccgggggcgagcactggctggccttcgcctggaacccgcgctcgaacacctgctacctcttcgaccccttcgggttctcggacgagcgcctcaagcagatctaccagttcgagtacgagggcctgctgcgccgcagcgccctggccaccgaggaccgctgcgtcaccctggaaaagtccacccagaccgtgcagggtccgcgctcggccgcctgcgggctcttctgctgcatgttcctgcacgccttcgtgcactggcccgaccgccccatggacaagaaccccaccatgaacttgctgacgggggtgcccaacggcatgctccagtcgccccaggtggaacccaccctgcgccgcaaccaggaggcgctctaccgcttcctcaactcccactccgcctactttcgctcccaccgcgcgcgcatcgagaaggccaccgccttcgaccgcatgaatcaagacatgtaaaccgtgtgtgtatgttaaatgtctttaataaacagcactttcatgttacacatgcatctgagatgatttatttagaaatcgaaagggttctgccgggtctcggcatggcccgcgggcagggacacgttgcggaactggtacttggccagccacttgaactcggggatcagcagtttgggcagcggggtgtcggggaaggagtcggtccacagcttccgcgtcagttgcagggcgcccagcaggtcgggcgcggagatcttgaaatcgcagttgggacccgcgttctgcgcgcgggagttgcggtacacggggttgcagcactggaacaccatcagggccgggtgcttcacgctcgccagcaccgtcgcgtcggtgatgctctccacgtcgaggtcctcggcgttggccatcccgaagggggtcatcttgcaggtctgccttcccatggtgggcacgcacccgggcttgtggttgcaatcgcagtgcagggggatcagcatcatctgggcctggtcggcgttcatccccgggtacatggccttcatgaaagcctccaattgcctgaacgcctgctgggccttggctccctcggtgaagaagaccccgcaggacttgctagagaactggttggtggcgcacccggcgtcgtgcacgcagcagcgcgcgtcgttgttggccagctgcaccacgctgcgcccccagcggttctgggtgatcttggcccggtcggggttctccttcagcgcgcgctgcccgttctcgctcgccacatccatctcgatcatgtgctccttctggatcatggtggtcccgtgcaggcaccgcagcttgccctcggcctcggtgcacccgtgcagccacagcgcgcacccggtgcactcccagttcttgtgggcgatctgggaatgcgcgtgcacgaagccctgcaggaagcggcccatcatggtggtcagggtcttgttgctagtgaaggtcagcggaatgccgcggtgctcctcgttgatgtacaggtggcagatgcggcggtacacctcgccctgctcgggcatcagctggaagttggctttcaggtcggtctccacgcggtagcggtccatcagcatagtcatgatttccatacccttctcccaggccgagacgatgggcaggctcatagggttcttcaccatcatcttagcgctagcagccgcggccagggggtcgctctcgtccagggtctcaaagctccgcttgccgtccttctcggtgatccgcaccggggggtagctgaagcccacggccgccagctcctcctcggcctgtctttcgtcctcgctgtcctggctgacgtcctgcaggaccacatgcttggtcttgcggggtttcttcttgggcggcagcggcggcggagatgttggagatggcgagggggagcgcgagttctcgctcaccactactatctcttcctcttcttggtccgaggccacgcggcggtaggtatgtctcttcgggggcagaggcggaggcgacgggctctcgccgccgcgacttggcggatggctggcagagccccttccgcgttcgggggtgcgctcccggcggcgctctgactgacttcctccgcggccggccattgtgttctcctagggaggaacaacaagcatggagactcagccatcgccaacctcgccatctgcccccaccgccgacgagaagcagcagcagcagaatgaaagcttaaccgccccgccgcccagccccgccacctccgacgcggccgtcccagacatgcaagagatggaggaatccatcgagattgacctgggctatgtgacgcccgcggagcacgaggaggagctggcagtgcgcttttcacaagaagagatacaccaagaacagccagagcaggaagcagagaatgagcagagtcaggctgggctcgagcatgacggcgactacctccacctgagcgggggggaggacgcgctcatcaagcatctggcccggcaggccaccatcgtcaaggatgcgctgctcgaccgcaccgaggtgcccctcagcgtggaggagctcagccgcgcctacgagttgaacctcttctcgccgcgcgtgccccccaagcgccagcccaatggcacctgcgagcccaacccgcgcctcaacttctacccggtcttcgcggtgcccgaggccctggccacctaccacatctttttcaagaaccaaaagatccccgtctcctgccgcgccaaccgcacccgcgccgacgcccttttcaacctgggtcccggcgcccgcctacctgatatcgcctccttggaagaggttcccaagatcttcgagggtctgggcagcgacgagactcgggccgcgaacgctctgcaaggagaaggaggagagcatgagcaccacagcgccctggtcgagttggaaggcgacaacgcgcggctggcggtgctcaaacgcacggtcgagctgacccatttcgcctacccggctctgaacctgccccccaaagtcatgagcgcggtcatggaccaggtgctcatcaagcgcgcgtcgcccatctccgaggacgagggcatgcaagactccgaggagggcaagcccgtggtcagcgacgagcagctggcccggtggctgggtcctaatgctagtccccagagtttggaagagcggcgcaaactcatgatggccgtggtcctggtgaccgtggagctggagtgcctgcgccgcttcttcgccgacgcggagaccctgcgcaaggtcgaggagaacctgcactacctcttcaggcacgggttcgtgcgccaggcctgcaagatctccaacgtggagctgaccaacctggtctcctacatgggcatcttgcacgagaaccgcctggggcagaacgtgctgcacaccaccctgcgcggggaggcccggcgcgactacatccgcgactgcgtctacctctacctctgccacacctggcagacgggcatgggcgtgtggcagcagtgtctggaggagcagaacctgaaagagctctgcaagctcctgcagaagaacctcaagggtctgtggaccgggttcgacgagcgcaccaccgcctcggacctggccgacctcattttccccgagcgcctcaggctgacgctgcgcaacggcctgcccgactttatgagccaaagcatgttgcaaaactttcgctctttcatcctcgaacgctccggaatcctgcccgccacctgctccgcgctgccctcggacttcgtgccgctgaccttccgcgagtgccccccgccgctgtggagccactgctacctgctgcgcctggccaactacctggcctaccactcggacgtgatcgaggacgtcagcggcgagggcctgctcgagtgccactgccgctgcaacctctgcacgccgcaccgctccctggcctgcaacccccagctgctgagcgagacccagatcatcggcaccttcgagttgcaagggcccagcgaaggcgagggttcagccgccaaggggggtctgaaactcaccccggggctgtggacctcggcctacttgcgcaagttcgtgcccgaggactaccatcccttcgagatcaggttctacgaggaccaatcccatccgcccaaggccgagctgtcggcctgcgtcatcacccagggggcgatcctggcccaattgcaagccatccagaaatcccgccaagaattcttgctgaaaaagggccgcggggtctacctcgacccccagaccggtgaggagctcaaccccggcttcccccaggatgccccgaggaaacaagaagctgaaagtggagctgccgcccgtggaggatttggaggaagactgggagaacagcagtcaggcagaggaggaggagatggaggaagactgggacagcactcaggcagaggaggacagcctgcaagacagtctggaggaagacgaggaggaggcagaggaggaggtggaagaagcagccgccgccagaccgtcgtcctcggcgggggagaaagcaagcagcacggataccatctccgctccgggtcggggtcccgctcgaccacacagtagatgggacgagaccggacgattcccgaaccccaccacccagaccggtaagaaggagcggcagggatacaagtcctggcgggggcacaaaaacgccatcgtctcctgcttgcaggcctgcgggggcaacatctccttcacccggcgctacctgctcttccaccgcggggtgaactttccccgcaacatcttgcattactaccgtcacctccacagcccctactacttccaagaagaggcagcagcagcagaaaaagaccagcagaaaaccagcagctagaaaatccacagcggcggcagcaggtggactgaggatcgcggcgaacgagccggcgcaaacccgggagctgaggaaccggatctttcccaccctctatgccatcttccagcagagtcgggggcaggagcaggaactgaaagtcaagaaccgttctctgcgctcgctcacccgcagttgtctgtatcacaagagcgaagaccaacttcagcgcactctcgaggacgccgaggctctcttcaacaagtactgcgcgctcactcttaaagagtagcccgcgcccgcccagtcgcagaaaaaggcgggaattacgtcacctgtgcccttcgccctagccgcctccacccatcatcatgagcaaagagattcccacgccttacatgtggagctaccagccccagatgggcctggccgccggtgccgcccaggactactccacccgcatgaattggctcagcgccgggcccgcgatgatctcacgggtgaatgacatccgcgcccaccgaaaccagatactcctagaacagtcagcgctcaccgccacgccccgcaatcacctcaatccgcgtaattggcccgccgccctggtgtaccaggaaattccccagcccacgaccgtactacttccgcgagacgcccaggccgaagtccagctgactaactcaggtgtccagctggcgggcggcgccaccctgtgtcgtcaccgccccgctcagggtataaagcggctggtgatccggggcagaggcacacagctcaacgacgaggtggtgagctcttcgctgggtctgcgacctgacggagtcttccaactcgccggatcggggagatcttccttcacgcctcgtcaggccgtcctgactttggagagttcgtcctcgcagccccgctcgggtggcatcggcactctccagttcgtggaggagttcactccctcggtctacttcaaccccttctccggctcccccggccactacccggacgagttcatcccgaacttcgacgccatcagcgagtcggtggacggctacgattgaatgtcccatggtggcgcagctgacctagctcggcttcgacacctggaccactgccgccgcttccgctgcttcgctcgggatctcgccgagtttgcctactttgagctgcccgaggagcaccctcagggcccggcccacggagtgcggatcgtcgtcgaagggggcctcgactcccacctgcttcggatcttcagccagcgtccgatcctggtcgagcgcgagcaaggacagacccttctgactctgtactgcatctgcaaccaccccggcctgcatgaaagtctttgttgtctgctgtgtactgagtataataaaagctgagatcagcgactactccggacttccgtgtgtttaaactcacccccttatccagtgaaataaagatcatattgatgatgattttacagaaataaaaaataatcatttgatttgaaataaagatacaatcatattgatgatttgagtttaacaaaaaaataaagaatcacttacttgaaatctgataccaggtctctgtccatgttttctgccaacaccacttcactcccctcttcccagctctggtactgcaggccccggcgggctgcaaacttcctccacacgctgaaggggatgtcaaattcctcctgtccctcaatcttcattttatcttctatcagatgtccaaaaagcgcgtccgggtggatgatgacttcgaccccgtctacccctacgatgcagacaacgcaccgaccgtgcccttcatcaacccccccttcgtctcttcagatggattccaagagaagcccctgggggtgttgtccctgcgactggccgaccccgtcaccaccaagaacggggaaatcaccctcaagctgggagagggggtggacctcgattcctcgggaaaactcatctccaacacggccaccaaggccgccgcccctctcagtttttccaacaacaccatttcccttaacatggatcaccccttttacactaaagatggaaaattatccttacaagtttctccaccattaaatatactgagaacaagcattctaaacacactagctttaggttttggatcaggtttaggactccgtggctctgccttggcagtacagttagtctctccacttacatttgatactgatggaaacataaagcttaccttagacagaggtttgcatgttacaacaggagatgcaattgaaagcaacataagctgggctaaaggtttaaaatttgaagatggagccatagcaaccaacattggaaatgggttagagtttggaagcagtagtacagaaacaggtgttgatgatgcttacccaatccaagttaaacttggatctggccttagctttgacagtacaggagccataatggctggtaacaaagaagacgataaactcactttgtggacaacacctgatccatcaccaaactgtcaaatactcgcagaaaatgatgcaaaactaacactttgcttgactaaatgtggtagtcaaatactggccactgtgtcagtcttagttgtaggaagtggaaacctaaaccccattactggcaccgtaagcagtgctcaggtgtttctacgttttgatgcaaacggtgttcttttaacagaacattctacactaaaaaaatactgggggtataggcagggagatagcatagatggcactccatataccaatgctgtaggattcatgcccaatttaaaagcttatccaaagtcacaaagttctactactaaaaataatatagtagggcaagtatacatgaatggagatgtttcaaaacctatgcttctcactataaccctcaatggtactgatgacagcaacagtacatattcaatgtcattttcatacacctggactaatggaagctatgttggagcaacatttggggctaactcttataccttctcatacatcgcccaagaatgaacactgtatcccaccctgcatgccaacccttcccaccccactctgtggaacaaactctgaaacacaaaataaaataaagttcaagtgttttattgattcaacagttttacaggattcgagcagttatttttcctccaccctcccaggacatggaatacaccaccctctccccccgcacagccttgaacatctgaatgccattggtgatggacatgcttttggtctccacgttccacacagtttcagagcgagccagtctcgggtcggtcagggagatgaaaccctccgggcactcccgcatctgcacctcacagctcaacagctgaggattgtcctcggtggtcgggatcacggttatctggaagaagcagaagagcggcggtgggaatcatagtccgcgaacgggatcggccggtggtgtcgcatcaggccccgcagcagtcgctgccgccgccgctccgtcaagctgctgctcagggggtccgggtccagggactccctcagcatgatgcccacggccctcagcatcagtcgtctggtgcggcgggcgcagcagcgcatgcggatctcgctcaggtcgctgcagtacgtgcaacacagaaccaccaggttgttcaacagtccatagttcaacacgctccagccgaaactcatcgcgggaaggatgctacccacgtggccgtcgtaccagatcctcaggtaaatcaagtggtgccccctccagaacacgctgcccacgtacatgatctccttgggcatgtggcggttcaccacctcccggtaccacatcaccctctggttgaacatgcagccccggatgatcctgcggaaccacagggccagcaccgccccgcccgccatgcagcgaagagaccccgggtcccggcaatggcaatggaggacccaccgctcgtacccgtggatcatctgggagctgaacaagtctatgttggcacagcacaggcatatgctcatgcatctcttcagcactctcaactcctcgggggtcaaaaccatatcccagggcacggggaactcttgcaggacagcgaaccccgcagaacagggcaatcctcgcacagaacttacattgtgcatggacagggtatcgcaatcaggcagcaccgggtgatcctccaccagagaagcgcgggtctcggtctcctcacagcgtggtaagggggccggccgatacgggtgatggcgggacgcggctgatcgtgttcgcgaccgtgtcatgatgcagttgctttcggacattttcgtacttgctgtagcagaacctggtccgggcgctgcacaccgatcgccggcggcggtctcggcgcttggaacgctcggtgttgaaattgtaaaacagccactctctcagaccgtgcagcagatctagggcctcaggagtgatgaagatcccatcatgcctgatggctctgatcacatcgaccaccgtggaatgggccagacccagccagatgatgcaattttgttgggtttcggtgacggcgggggagggaagaacaggaagaaccatgattaacttttaatccaaacggtctcggagtacttcaaaatgaagatcgcggagatggcacctctcgcccccgctgtgttggtggaaaataacagccaggtcaaaggtgatacggttctcgagatgttccacggtggcttccagcaaagcctccacgcgcacatccagaaacaagacaatagcgaaagcgggagggttctctaattcctcaatcatcatgttacactcctgcaccatccccagataattttcatttttccagccttgaatgattcgaactagttcctgaggtaaatccaagccagccatgataaagagctcgcgcagagcgccctccaccggcattcttaagcacaccctcataattccaagatattctgctcctggttcacctgcagcagattgacaagcggaatatcaaaatctctgccgcgatccctgagctcctccctcagcaataactgtaagtactctttcatatcctctccgaaatttttagccataggaccaccaggaataagattagggcaagccacagtacagataaaccgaagtcctccccagtgagcattgccaaatgcaagactgctataagcatgctggctagacccggtgatatcttccagataactggacagaaaatcgcccaggcaatttttaagaaaatcaacaaaagaaaaatcctccaggtggacgtttagagcctcgggaacaacgatgaagtaaatgcaagcggtgcgttccagcatggttagttagctgatctgtagaaaaaacaaaaatgaacattaaaccatgctagcctggcgaacaggtgggtaaatcgttctctccagcaccaggcaggccacggggtctccggcgcgaccctcgtaaaaattgtcgctatgattgaaaaccatcacagagagacgttcccggtggccggcgtgaatgattcgacaagatgaatacacccccggaacattggcgtccgcgagtgaaaaaaagcgcccgaggaagcaataaggcactacaatgctcagtctcaagtccagcaaagcgatgccatgcggatgaagcacaaaattctcaggtgcgtacaaaatgtaattactcccctcctgcacaggcagcaaagcccccgatccctccaggtacacatacaaagcctcagcgtccatagcttaccgagcagcagcacacaacaggcgcaagagtcagagaaaggctgagctctaacctgtccacccgctctctgctcaatatatagcccagatctacactgacgtaaaggccaaagtctaaaaatacccgccaaataatcacacacgcccagcacacgcccagaaaccggtgacacactcaaaaaaatacgcgcacttcctcaaacgcccaaaactgccgtcatttccgggttcccacgctacgtcatcaaaacacgactttcaaattccgtcgaccgttaaaaacgtcacccgccccgcccctaacggtcgcccgtctctcagccaatcagcgccccgcatccccaaattcaaacacctcatttgcatattaacgcgcacaaaaagtttgaggtatattattgatgatgg

SEQ ID NO: 63 - DNA, 9735 bp, Artificial Sequence
  Synthetic Construct
ggcgtaatgctctgccagtgttacaaccaattaaccaattctgattagaaaaactcatcgagcatcaaatgaaactgcaatttattcatatcaggattatcaataccatatttttgaaaaagccgtttctgtaatgaaggagaaaactcaccgaggcagttccataggatggcaagatcctggtatcggtctgcgattccgactcgtccaacatcaatacaacctattaatttcccctcgtcaaaaataaggttatcaagtgagaaatcaccatgagtgacgactgaatccggtgagaatggcaaaagcttatgcatttctttccagacttgttcaacaggccagccattacgctcgtcatcaaaatcactcgcatcaaccaaaccgttattcattcgtgattgcgcctgagcgagacgaaatacgcgatcgctgttaaaaggacaattacaaacaggaatcaaatgcaaccggcgcaggaacactgccagcgcatcaacaatattttcacctgaatcaggatattcttctaatacctggaatgctgttttcccggggatcgcagtggtgagtaaccatgcatcatcaggagtacggataaaatgcttgatggtcggaagaggcataaattccgtcagccagtttagtctgaccatctcatctgtaacatcattggcaacgctacctttgccatgtttcagaaacaactctggcgcatcgggcttcccatacaatcgatagattgtcgcacctgattgcccgacattatcgcgagcccatttatacccatataaatcagcatccatgttggaatttaatcgcggcctcgagcaagacgtttcccgttgaatatggctcataacaccccttgtattactgtttatgtaagcagacaggtcgacaatattggctattggccattgcatacgttgtatctatatcataatatgtacatttatattggctcatgtccaatatgaccgccatgttgacattgattattgactagttattaatagtaatcaattacggggtcattagttcatagcccatatatggagttccgcgttacataacttacggtaaatggcccgcctggctgaccgcccaacgacccccgcccattgacgtcaataatgacgtatgttcccatagtaacgccaatagggactttccattgacgtcaatgggtggagtatttacggtaaactgcccacttggcagtacatcaagtgtatcatatgccaagtccgccccctattgacgtcaatgacggtaaatggcccgcctggcattatgcccagtacatgaccttacgggactttcctacttggcagtacatctacgtattagtcatcgctattaccatggtgatgcggttttggcagtacaccaatgggcgtggatagcggtttgactcacggggatttccaagtctccaccccattgacgtcaatgggagtttgttttggcaccaaaatcaacgggactttccaaaatgtcgtaataaccccgccccgttgacgcaaatgggcggtaggcgtgtacggtgggaggtctatataagcagagctcgtttagtgaaccgtcagatcgcctggagacgccatccacgctgttttgacctccatagaagacaccgggaccgatccagcctccgcggccgggaacggtgcattggaacgcggattccccgtgccaagagtgactcaccgtccggatctcagcaagcaggtatgtactctccagggtgggcctggcttccccagtcaagactccagggatttgagggacgctgtgggctcttctcttacatgtaccttttgcttgcctcaaccctgactatcttccaggtcaggatcccagagtcaggggtctgtattttcctgctggtggctccagttcaggaacagtaaaccctgctccgaatattgcctctcacatctcgtcaatctccgcgaggactggggaccctgtgacgaacatggctagcggagctgccccggagccggagaggacccccgttggccagggatcgtgggcccatccgggacgcaccaggggaccatccgacaggggattctgtgtggtgtcaccggccaggccagcagaagaggcaaccagcctcgagggagcgttgtctggaaccagacattcccacccgtcggtgggccggcagcaccacgcgggaccaccgtccacttccagaccgccacggccatgggacaccccttgcccgcctgtgtatgccgagactaaacacttcctgtactcatccggagacaaggaacagcttcggccgtccttcctcctgtcgtcgctcagaccgagcctgaccggagcacgcagattggtggaaactatcttccttgggtcacgtccgtggatgccaggtaccccacggcgcctcccgcgcctcccacagagatactggcagatgcggcctctgttcctggaattgctgggaaaccacgctcagtgcccgtacggagtcctgctcaagactcactgccctctgagggcggcggtcactccggcggccggagtgtgcgcacgggagaagccccagggaagcgtggcagctccggaagaggaggacaccgatccgcgccgcctcgtgcaacttctgcgccagcactcctcgccctggcaagtctacgggttcgtccgcgcctgcctgcgccgcctggtgccgcctgggctctggggttcccggcataacgagcgccgcttcctgagaaatactaagaagtttatctcacttggaaaacatgccaagttgtcgctgcaagaactcacgtggaagatgtcagtccgcgattgcgcctggctgcgccgctcgccgggcgtcgggtgtgttccagctgcagaacaccgcctgagagaagaaattctggccaaatttctgcattggctgatgtcagtgtacgtggtcgagctgctgcgctcctttttctacgtcactgagactacctttcaaaagaaccgcctgttcttctaccgcaaatctgtgtggagcaagctgcagtcaatcggcattcgccagcatctgaagagggtgcagctgcgggaactttccgaggcagaagtccgccagcaccgggaggcccggccggcgcttctcacgtcgcgtctgagattcatcccaaagcccgacgggctgaggcctatcgtcaacatggattacgtcgtgggcgctcgcacctttcgccgtgaaaagcgggccgaacgcttgacctcacgggtgaaggccctcttctccgtgctgaactacgagagagcaagacggcctggcctgctgggagcttcggtgctgggactggacgatatccaccgggcttggcggacctttgttctccgggtgagagcccaagaccctccgccggaactgtacttcgtgaaggtggcgatcaccggagcctatgatactattccgcaagatcgactcaccgaagtcatcgcctcgatcatcaaaccgcagaacacttactgcgtcaggcggtacgccgtggtccagaaggccgcgcatggccacgtgagaaaggcgttcaagtcgcacgtgtccactctcaccgacctccagccttacatgaggcaattcgttgcgcatttgcaagagacttcgcccctgagagatgcggtggtcatcgagcagagctccagcctgaacgaagcgagcagcggtctgtttgacgtgttcctccgcttcatgtgtcatcacgcggtgcgaatcaggggaaaatcatacgtgcagtgccagggaatcccacaaggcagcattctgtcgactctcttgtgttccctttgctacggcgatatggaaaacaagctgttcgctgggatcagacgggacgggttgctgctcagactggtggacgacttcctgctggtgactccgcacctcactcacgccaaaacctttctccgcactctggtgaggggagtgccagaatacggctgtgtggtcaatctccggaaaactgtggtgaatttccctgtcgaggatgaggcactcggaggaaccgcatttgtccaaatgccagcacatggcctgttcccatggtgcggtctgctgctggacacccgaactcttgaagtgcagtccgactactccagctatgcccggacgagcatccgcgccagcctcactttcaatcgcggctttaaggccggacgaaacatgcgcagaaagcttttcggagtcctccggcttaaatgccattcgctctttctcgatctccaagtcaattcgctgcagaccgtgtgcacgaacatctacaagatcctgctgctccaagcctaccggttccacgcttgcgtgcttcagctgccgtttcaccaacaggtgtggaagaacccgaccttctttctgcgggtcattagcgatactgcctccctgtgttactcaatcctcaaggcaaagaacgccggaatgtcgctgggtgcgaaaggagccgcgggacctcttcctagcgaagcggtgcagtggctctgccaccaggctttcctcctgaagctgaccaggcacagagtgacctacgtcccgctgctgggctcgctgcgcactgcacagacccagctgtctagaaaactccccggcaccaccctgaccgctctggaagccgccgccaacccagcattgccgtcagatttcaagaccatcttggacggatccggccagtgcaccaattacgccctgctgaagctggccggcgacgtggaatctaaccctggccctgaatcgccaagcgcaccccctcatcggtggtgcatcccttggcaacgcctcctcctgaccgcctcactgctgactttctggaacccgccgaccaccgcaaagctgaccattgagagcactcccttcaacgtggctgaggggaaggaggtgctgctcctggtgcacaatctgccccagcacctgttcgggtactcctggtacaagggagaacgcgtggacgggaaccggcagatcataggctacgtcatcggaacccagcaggccacacccggtccagcgtacagcggccgggagattatctacccgaacgcctccctgctgatccaaaacatcatccagaacgacaccggtttctacactctgcacgtgattaagtcagatctggtcaacgaagaggccaccggccaattcagggtgtaccccgaactccctaagccgttcatcacctcgaacaacagcaacccggtcgaggatgaagatgcggtggccttgacgtgcgaacctgagatccagaacaccacctacttgtggtgggtgaacaatcagagcctgccagtctccccacgactccagctgtcgaacgacaacaggaccctgactttgctgtccgtgactcggaacgacgtgggcccttatgaatgcggtatccagaacaagctgtccgtggaccacagcgaccctgtgatcctgaacgtcctttacgggccggacgaccccaccatttccccgtcgtacacttactaccggccgggcgtgaacctgtccctgtcgtgccacgctgcctccaatccgccggcccagtactcctggctcatcgacggaaacatccagcagcacacccaagaactgttcatctccaacattaccgagaaaaactcgggactttacacctgtcaagccaacaattccgccagcggccactcccgcaccactgtcaaaactatcactgtgtccgccgaactcccgaagcccagcatcagctccaacaactcgaagcccgtggaggataaggacgctgtcgcgttcacctgtgaaccagaggcacagaataccacctacctttggtgggtcaacggacagtccctgcctgtctcaccgagactgcagctgtcaaacgggaataggactctgaccttgtttaacgtcacccggaacgacgcccgggcctacgtgtgcggcatccagaactccgtgagcgcaaaccggtctgacccagtgaccctggatgtgctgtacggccccgacactccgatcatttcaccccccgattcatcctacctgtccggcgctaacctcaacctctcatgccactccgcatccaaccccagcccgcaatattcgtggcgcattaacggaattcctcagcaacatacccaggtcctgttcattgcgaagatcacccctaacaacaacggaacctacgcctgctttgtgtcaaacctggccactggtagaaacaactccatcgtgaagtccattaccgtgtcggcgtccggaacttccccgggcctgagcgccggcgccaccgtgggaattatgatcggcgtgctcgtgggagtggccctgatcggatccggcgagggcagaggcagcctgctgacatgtggcgacgtggaagagaaccctggccccacccctggaacccagagccccttcttccttctgctgctgctgaccgtgctgactgtcgtgacaggctctggccacgccagctctacacctggcggcgagaaagagacaagcgccacccagagaagcagcgtgccaagcagcaccgagaagaacgccgtgtccatgaccagctccgtgctgagcagccactctcctggcagcggcagcagcacaacacagggccaggatgtgacactggcccctgccacagaacctgcctctggatctgccgccacctggggacaggacgtgacaagcgtgccagtgaccagacctgccctgggctctacaacaccccctgcccacgatgtgaccagcgcccctgataacaagcctgcccctggaagcacagcccctccagctcatggcgtgacctctgccccagataccagaccagccccaggatctacagccccacccgcacacggcgtgacaagtgcccctgacacaagacccgctccaggctctactgctcctcctgcccatggcgtgacaagcgctcccgatacaaggccagctcctggctccacagcaccaccagcacatggcgtgacatcagctcccgacactagacctgctcccggatcaaccgctccaccagctcacggcgtgaccagcgcacctgataccagacctgctctgggaagcaccgcccctcccgtgcacaatgtgacatctgcttccggcagcgccagcggctctgcctctacactggtgcacaacggcaccagcgccagagccacaacaaccccagccagcaagagcacccccttcagcatccctagccaccacagcgacacccctaccacactggccagccactccaccaagaccgatgcctctagcacccaccactccagcgtgccccctctgaccagcagcaaccacagcacaagcccccagctgtctaccggcgtctcattcttctttctgtccttccacatcagcaacctgcagttcaacagcagcctggaagatcccagcaccgactactaccaggaactgcagcgggatatcagcgagatgttcctgcaaatctacaagcagggcggcttcctgggcctgagcaacatcaagttcagacccggcagcgtggtggtgcagctgaccctggctttccgggaaggcaccatcaacgtgcacgacgtggaaacccagttcaaccagtacaagaccgaggccgccagccggtacaacctgaccatctccgatgtgtccgtgtccgacgtgcccttcccattctctgcccagtctggcgcaggcgtgccaggatggggaattgctctgctggtgctcgtgtgcgtgctggtggccctggccatcgtgtatctgattgccctggccgtgtgccagtgccggcggaagaattacggccagctggacatcttccccgccagagacacctaccaccccatgagcgagtaccccacataccacacccacggcagatacgtgccacccagctccaccgacagatccccctacgagaaagtgtctgccggcaacggcggcagctccctgagctacacaaatcctgccgtggccgctgcctccgccaacctgtgaagatctgggccctaacaaaacaaaaagatggggttattccctaaacttcatgggttacgtaattggaagttgggggacattgccacaagatcatattgtacaaaagatcaaacactgttttagaaaacttcctgtaaacaggcctattgattggaaagtatgtcaaaggattgtgggtcttttgggctttgctgctccatttacacaatgtggatatcctgccttaatgcctttgtatgcatgtatacaagctaaacaggctttcactttctcgccaacttacaaggcctttctaagtaaacagtacatgaacctttaccccgttgctcggcaacggcctggtctgtgccaagtgtttgctgacgcaacccccactggctggggcttggccataggccatcagcgcatgcgtggaacctttgtggctcctctgccgatccatactgcggaactcctagccgcttgttttgctcgcagccggtctggagcaaagctcataggaactgacaattctgtcgtcctctcgcggaaatatacatcgtttcgatctacgtatgatctttttccctctgccaaaaattatggggacatcatgaagccccttgagcatctgacttctggctaataaaggaaatttattttcattgcaatagtgtgttggaattttttgtgtctctcactcggaaggaattctgcattaatgaatcggccaacgcgcggggagaggcggtttgcgtattgggcgctcttccgcttcctcgctcactgactcgctgcgctcggtcgttcggctgcggcgagcggtatcagctcactcaaaggcggtaatacggttatccacagaatcaggggataacgcaggaaagaacatgtgagcaaaaggccagcaaaaggccaggaaccgtaaaaaggccgcgttgctggcgtttttccataggctccgcccccctgacgagcatcacaaaaatcgacgctcaagtcagaggtggcgaaacccgacaggactataaagataccaggcgtttccccctggaagctccctcgtgcgctctcctgttccgaccctgccgcttaccggatacctgtccgcctttctcccttcgggaagcgtggcgctttctcatagctcacgctgtaggtatctcagttcggtgtaggtcgttcgctccaagctgggctgtgtgcacgaaccccccgttcagcccgaccgctgcgccttatccggtaactatcgtcttgagtccaacccggtaagacacgacttatcgccactggcagcagccactggtaacaggattagcagagcgaggtatgtaggcggtgctacagagttcttgaagtggtggcctaactacggctacactagaagaacagtatttggtatctgcgctctgctgaagccagttaccttcggaaaaagagttggtagctcttgatccggcaaacaaaccaccgctggtagcggtggtttttttgtttgcaagcagcagattacgcgcagaaaaaaaggatctcaagaagatcctttgatcttttctacggggtctgacgctcagtggaacgaaaactcacgttaagggattttggtcatgagattatcaaaaaggatcttcacctagatccttttaaattaaaaatgaagttttaaatcaatctaaagtatatatgagtaaacttggtctgacagttaccaatgcttaatcagtgaggcacctatctcagcgatctgtctatttcgttcatccatagttgcctgactc

SEQ ID NO: 64 - DNA, 36247 bp, Artificial Sequence
  Synthetic Construct
ccatcttcaataatatacctcaaactttttgtgcgcgttaatatgcaaatgaggcgtttgaatttggggaggaagggcggtgattggtcgagggatgagcgaccgttaggggcggggcgagtgacgttttgatgacgtggttgcgaggaggagccagtttgcaagttctcgtgggaaaagtgacgtcaaacgaggtgtggtttgaacacggaaatactcaattttcccgcgctctctgacaggaaatgaggtgtttctgggcggatgcaagtgaaaacgggccattttcgcgcgaaaactgaatgaggaagtgaaaatctgagtaatttcgcgtttatggcagggaggagtatttgccgagggccgagtagactttgaccgattacgtgggggtttcgattaccgtgtttttcacctaaatttccgcgtacggtgtcaaagtccggtgtttttactactgtaatagtaatcaattacggggtcattagttcatagcccatatatggagttccgcgttacataacttacggtaaatggcccgcctggctgaccgcccaacgacccccgcccattgacgtcaataatgacgtatgttcccatagtaacgccaatagggactttccattgacgtcaatgggtggagtatttacggtaaactgcccacttggcagtacatcaagtgtatcatatgccaagtacgccccctattgacgtcaatgacggtaaatggcccgcctggcattatgcccagtacatgaccttatgggactttcctacttggcagtacatctacgtattagtcatcgctattaccatggtgatgcggttttggcagtacatcaatgggcgtggatagcggtttgactcacggggatttccaagtctccaccccattgacgtcaatgggagtttgttttggcaccaaaatcaacgggactttccaaaatgtcgtaacaactccgccccattgacgcaaatgggcggtaggcgtgtacggtgggaggtctatataagcagagctgtccctatcagtgatagagatctccctatcagtgatagagagtttagtgaaccgtcagatccgctagggtaccgcgatcaccatggctagcggagctgccccggagccggagaggacccccgttggccagggatcgtgggcccatccgggacgcaccaggggaccatccgacaggggattctgtgtggtgtcaccggccaggccagcagaagaggcaaccagcctcgagggagcgttgtctggaaccagacattcccacccgtcggtgggccggcagcaccacgcgggaccaccgtccacttccagaccgccacggccatgggacaccccttgcccgcctgtgtatgccgagactaaacacttcctgtactcatccggagacaaggaacagcttcggccgtccttcctcctgtcgtcgctcagaccgagcctgaccggagcacgcagattggtggaaactatcttccttgggtcacgtccgtggatgccaggtaccccacggcgcctcccgcgcctcccacagagatactggcagatgcggcctctgttcctggaattgctgggaaaccacgctcagtgcccgtacggagtcctgctcaagactcactgccctctgagggcggcggtcactccggcggccggagtgtgcgcacgggagaagccccagggaagcgtggcagctccggaagaggaggacaccgatccgcgccgcctcgtgcaacttctgcgccagcactcctcgccctggcaagtctacgggttcgtccgcgcctgcctgcgccgcctggtgccgcctgggctctggggttcccggcataacgagcgccgcttcctgagaaatactaagaagtttatctcacttggaaaacatgccaagttgtcgctgcaagaactcacgtggaagatgtcagtccgcgattgcgcctggctgcgccgctcgccgggcgtcgggtgtgttccagctgcagaacaccgcctgagagaagaaattctggccaaatttctgcattggctgatgtcagtgtacgtggtcgagctgctgcgctcctttttctacgtcactgagactacctttcaaaagaaccgcctgttcttctaccgcaaatctgtgtggagcaagctgcagtcaatcggcattcgccagcatctgaagagggtgcagctgcgggaactttccgaggcagaagtccgccagcaccgggaggcccggccggcgcttctcacgtcgcgtctgagattcatcccaaagcccgacgggctgaggcctatcgtcaacatggattacgtcgtgggcgctcgcacctttcgccgtgaaaagcgggccgaacgcttgacctcacgggtgaaggccctcttctccgtgctgaactacgagagagcaagacggcctggcctgctgggagcttcggtgctgggactggacgatatccaccgggcttggcggacctttgttctccgggtgagagcccaagaccctccgccggaactgtacttcgtgaaggtggcgatcaccggagcctatgatactattccgcaagatcgactcaccgaagtcatcgcctcgatcatcaaaccgcagaacacttactgcgtcaggcggtacgccgtggtccagaaggccgcgcatggccacgtgagaaaggcgttcaagtcgcacgtgtccactctcaccgacctccagccttacatgaggcaattcgttgcgcatttgcaagagacttcgcccctgagagatgcggtggtcatcgagcagagctccagcctgaacgaagcgagcagcggtctgtttgacgtgttcctccgcttcatgtgtcatcacgcggtgcgaatcaggggaaaatcatacgtgcagtgccagggaatcccacaaggcagcattctgtcgactctcttgtgttccctttgctacggcgatatggaaaacaagctgttcgctgggatcagacgggacgggttgctgctcagactggtggacgacttcctgctggtgactccgcacctcactcacgccaaaacctttctccgcactctggtgaggggagtgccagaatacggctgtgtggtcaatctccggaaaactgtggtgaatttccctgtcgaggatgaggcactcggaggaaccgcatttgtccaaatgccagcacatggcctgttcccatggtgcggtctgctgctggacacccgaactcttgaagtgcagtccgactactccagctatgcccggacgagcatccgcgccagcctcactttcaatcgcggctttaaggccggacgaaacatgcgcagaaagcttttcggagtcctccggcttaaatgccattcgctctttctcgatctccaagtcaattcgctgcagaccgtgtgcacgaacatctacaagatcctgctgctccaagcctaccggttccacgcttgcgtgcttcagctgccgtttcaccaacaggtgtggaagaacccgaccttctttctgcgggtcattagcgatactgcctccctgtgttactcaatcctcaaggcaaagaacgccggaatgtcgctgggtgcgaaaggagccgcgggacctcttcctagcgaagcggtgcagtggctctgccaccaggctttcctcctgaagctgaccaggcacagagtgacctacgtcccgctgctgggctcgctgcgcactgcacagacccagctgtctagaaaactccccggcaccaccctgaccgctctggaagccgccgccaacccagcattgccgtcagatttcaagaccatcttggacggatccggccagtgcaccaattacgccctgctgaagctggccggcgacgtggaatctaaccctggccctgaatcgccaagcgcaccccctcatcggtggtgcatcccttggcaacgcctcctcctgaccgcctcactgctgactttctggaacccgccgaccaccgcaaagctgaccattgagagcactcccttcaacgtggctgaggggaaggaggtgctgctcctggtgcacaatctgccccagcacctgttcgggtactcctggtacaagggagaacgcgtggacgggaaccggcagatcataggctacgtcatcggaacccagcaggccacacccggtccagcgtacagcggccgggagattatctacccgaacgcctccctgctgatccaaaacatcatccagaacgacaccggtttctacactctgcacgtgattaagtcagatctggtcaacgaagaggccaccggccaattcagggtgtaccccgaactccctaagccgttcatcacctcgaacaacagcaacccggtcgaggatgaagatgcggtggccttgacgtgcgaacctgagatccagaacaccacctacttgtggtgggtgaacaatcagagcctgccagtctccccacgactccagctgtcgaacgacaacaggaccctgactttgctgtccgtgactcggaacgacgtgggcccttatgaatgcggtatccagaacaagctgtccgtggaccacagcgaccctgtgatcctgaacgtcctttacgggccggacgaccccaccatttccccgtcgtacacttactaccggccgggcgtgaacctgtccctgtcgtgccacgctgcctccaatccgccggcccagtactcctggctcatcgacggaaacatccagcagcacacccaagaactgttcatctccaacattaccgagaaaaactcgggactttacacctgtcaagccaacaattccgccagcggccactcccgcaccactgtcaaaactatcactgtgtccgccgaactcccgaagcccagcatcagctccaacaactcgaagcccgtggaggataaggacgctgtcgcgttcacctgtgaaccagaggcacagaataccacctacctttggtgggtcaacggacagtccctgcctgtctcaccgagactgcagctgtcaaacgggaataggactctgaccttgtttaacgtcacccggaacgacgcccgggcctacgtgtgcggcatccagaactccgtgagcgcaaaccggtctgacccagtgaccctggatgtgctgtacggccccgacactccgatcatttcaccccccgattcatcctacctgtccggcgctaacctcaacctctcatgccactccgcatccaaccccagcccgcaatattcgtggcgcattaacggaattcctcagcaacatacccaggtcctgttcattgcgaagatcacccctaacaacaacggaacctacgcctgctttgtgtcaaacctggccactggtagaaacaactccatcgtgaagtccattaccgtgtcggcgtccggaacttccccgggcctgagcgccggcgccaccgtgggaattatgatcggcgtgctcgtgggagtggccctgatcggatccggcgagggcagaggcagcctgctgacatgtggcgacgtggaagagaaccctggccccacccctggaacccagagccccttcttccttctgctgctgctgaccgtgctgactgtcgtgacaggctctggccacgccagctctacacctggcggcgagaaagagacaagcgccacccagagaagcagcgtgccaagcagcaccgagaagaacgccgtgtccatgaccagctccgtgctgagcagccactctcctggcagcggcagcagcacaacacagggccaggatgtgacactggcccctgccacagaacctgcctctggatctgccgccacctggggacaggacgtgacaagcgtgccagtgaccagacctgccctgggctctacaacaccccctgcccacgatgtgaccagcgcccctgataacaagcctgcccctggaagcacagcccctccagctcatggcgtgacctctgccccagataccagaccagccccaggatctacagccccacccgcacacggcgtgacaagtgcccctgacacaagacccgctccaggctctactgctcctcctgcccatggcgtgacaagcgctcccgatacaaggccagctcctggctccacagcaccaccagcacatggcgtgacatcagctcccgacactagacctgctcccggatcaaccgctccaccagctcacggcgtgaccagcgcacctgataccagacctgctctgggaagcaccgcccctcccgtgcacaatgtgacatctgcttccggcagcgccagcggctctgcctctacactggtgcacaacggcaccagcgccagagccacaacaaccccagccagcaagagcacccccttcagcatccctagccaccacagcgacacccctaccacactggccagccactccaccaagaccgatgcctctagcacccaccactccagcgtgccccctctgaccagcagcaaccacagcacaagcccccagctgtctaccggcgtctcattcttctttctgtccttccacatcagcaacctgcagttcaacagcagcctggaagatcccagcaccgactactaccaggaactgcagcgggatatcagcgagatgttcctgcaaatctacaagcagggcggcttcctgggcctgagcaacatcaagttcagacccggcagcgtggtggtgcagctgaccctggctttccgggaaggcaccatcaacgtgcacgacgtggaaacccagttcaaccagtacaagaccgaggccgccagccggtacaacctgaccatctccgatgtgtccgtgtccgacgtgcccttcccattctctgcccagtctggcgcaggcgtgccaggatggggaattgctctgctggtgctcgtgtgcgtgctggtggccctggccatcgtgtatctgattgccctggccgtgtgccagtgccggcggaagaattacggccagctggacatcttccccgccagagacacctaccaccccatgagcgagtaccccacataccacacccacggcagatacgtgccacccagctccaccgacagatccccctacgagaaagtgtctgccggcaacggcggcagctccctgagctacacaaatcctgccgtggccgctgcctccgccaacctgtgacgcacctcgagctgatcataatcagccataccacatttgtagaggttttacttgctttaaaaaacctcccacacctccccctgaacctgaaacataaaatgaatgcaattgttgttgttaacttgtttattgcagcttataatggttacaaataaagcaatagcatcacaaatttcacaaataaagcatttttttcactgcattctagttgtggtttgtccaaactcatcaatgtatcttaccaggtgccgagcctgcgagtgcggagggaagcatgccaggttccagcccgtgtgtgtggatgtgacggaggacctgcgacccgatcatttggtgttgccctgcaccgggacggagttcggttccagcggggaagaatctgactagagtgagtagtgttctggggcgggggaggacctgcatgagggccagaataactgaaatctgtgcttttctgtgtgttgcagcagcatgagcggaagcggctcctttgagggaggggtattcagcccttatctgacggggcgtctcccctcctgggcgggagtgcgtcagaatgtgatgggatccacggtggacggccggcccgtgcagcccgcgaactcttcaaccctgacctatgcaaccctgagctcttcgtcgttggacgcagctgccgccgcagctgctgcatctgccgccagcgccgtgcgcggaatggccatgggcgccggctactacggcactctggtggccaactcgagttccaccaataatcccgccagcctgaacgaggagaagctgttgctgctgatggcccagctcgaggccttgacccagcgcctgggcgagctgacccagcaggtggctcagctgcaggagcagacgcgggccgcggttgccacggtgaaatccaaataaaaaatgaatcaataaataaacggagacggttgttgattttaacacagagtctgaatctttatttgatttttcgcgcgcggtaggccctggaccaccggtctcgatcattgagcacccggtggatcttttccaggacccggtagaggtgggcttggatgttgaggtacatgggcatgagcccgtcccgggggtggaggtagctccattgcagggcctcgtgctcgggggtggtgttgtaaatcacccagtcatagcaggggcgcagggcatggtgttgcacaatatctttgaggaggagactgatggccacgggcagccctttggtgtaggtgtttacaaatctgttgagctgggagggatgcatgcggggggagatgaggtgcatcttggcctggatcttgagattggcgatgttaccgcccagatcccgcctggggttcatgttgtgcaggaccaccagcacggtgtatccggtgcacttggggaatttatcatgcaacttggaagggaaggcgtgaaagaatttggcgacgcctttgtgcccgcccaggttttccatgcactcatccatgatgatggcgatgggcccgtgggcggcggcctgggcaaagacgtttcgggggtcggacacatcatagttgtggtcctgggtgaggtcatcataggccattttaatgaatttggggcggagggtgccggactgggggacaaaggtaccctcgatcccgggggcgtagttcccctcacagatctgcatctcccaggctttgagctcggagggggggatcatgtccacctgcggggcgataaagaacacggtttccggggcgggggagatgagctgggccgaaagcaagttccggagcagctgggacttgccgcagccggtggggccgtagatgaccccgatgaccggctgcaggtggtagttgagggagagacagctgccgtcctcccggaggaggggggccacctcgttcatcatctcgcgcacgtgcatgttctcgcgcaccagttccgccaggaggcgctctccccccagggataggagctcctggagcgaggcgaagtttttcagcggcttgagtccgtcggccatgggcattttggagagggtttgttgcaagagttccaggcggtcccagagctcggtgatgtgctctacggcatctcgatccagcagacctcctcgtttcgcgggttgggacggctgcgggagtagggcaccagacgatgggcgtccagcgcagccagggtccggtccttccagggtcgcagcgtccgcgtcagggtggtctccgtcacggtgaaggggtgcgcgccgggctgggcgcttgcgagggtgcgcttcaggctcatccggctggtcgaaaaccgctcccgatcggcgccctgcgcgtcggccaggtagcaattgaccatgagttcgtagttgagcgcctcggccgcgtggcctttggcgcggagcttacctttggaagtctgcccgcaggcgggacagaggagggacttgagggcgtagagcttgggggcgaggaagacggactcgggggcgtaggcgtccgcgccgcagtgggcgcagacggtctcgcactccacgagccaggtgaggtcgggctggtcggggtcaaaaaccagtttcccgccgttctttttgatgcgtttcttacctttggtctccatgagctcgtgtccccgctgggtgacaaagaggctgtccgtgtccccgtagaccgactttatgggccggtcctcgagcggtgtgccgcggtcctcctcgtagaggaaccccgcccactccgagacgaaagcccgggtccaggccagcacgaaggaggccacgtgggacgggtagcggtcgttgtccaccagcgggtccaccttttccagggtatgcaaacacatgtccccctcgtccacatccaggaaggtgattggcttgtaagtgtaggccacgtgaccgggggtcccggccgggggggtataaaagggtgcgggtccctgctcgtcctcactgtcttccggatcgctgtccaggagcgccagctgttggggtaggtattccctctcgaaggcgggcatgacctcggcactcaggttgtcagtttctagaaacgaggaggatttgatattgacggtgccggcggagatgcctttcaagagcccctcgtccatctggtcagaaaagacgatctttttgttgtcgagcttggtggcgaaggagccgtagagggcgttggagaggagcttggcgatggagcgcatggtctggtttttttccttgtcggcgcgctccttggcggcgatgttgagctgcacgtactcgcgcgccacgcacttccattcggggaagacggtggtcagctcgtcgggcacgattctgacctgccagccccgattatgcagggtgatgaggtccacactggtggccacctcgccgcgcaggggctcattagtccagcagaggcgtccgcccttgcgcgagcagaaggggggcagggggtccagcatgacctcgtcgggggggtcggcatcgatggtgaagatgccgggcaggaggtcggggtcaaagtagctgatggaagtggccagatcgtccagggcagcttgccattcgcgcacggccagcgcgcgctcgtagggactgaggggcgtgccccagggcatgggatgggtaagcgcggaggcgtacatgccgcagatgtcgtagacgtagaggggctcctcgaggatgccgatgtaggtggggtagcagcgccccccgcggatgctggcgcgcacgtagtcatacagctcgtgcgagggggcgaggagccccgggcccaggttggtgcgactgggcttttcggcgcggtagacgatctggcggaaaatggcatgcgagttggaggagatggtgggcctttggaagatgttgaagtgggcgtggggcagtccgaccgagtcgcggatgaagtgggcgtaggagtcttgcagcttggcgacgagctcggcggtgactaggacgtccagagcgcagtagtcgagggtctcctggatgatgtcatacttgagctgtcccttttgtttccacagctcgcggttgagaaggaactcttcgcggtccttccagtactcttcgagggggaacccgtcctgatctgcacggtaagagcctagcatgtagaactggttgacggccttgtaggcgcagcagcccttctccacggggagggcgtaggcctgggcggccttgcgcagggaggtgtgcgtgagggcgaaagtgtccctgaccatgaccttgaggaactggtgcttgaagtcgatatcgtcgcagcccccctgctcccagagctggaagtccgtgcgcttcttgtaggcggggttgggcaaagcgaaagtaacatcgttgaagaggatcttgcccgcgcggggcataaagttgcgagtgatgcggaaaggttggggcacctcggcccggttgttgatgacctgggcggcgagcacgatctcgtcgaagccgttgatgttgtggcccacgatgtagagttccacgaatcgcggacggcccttgacgtggggcagtttcttgagctcctcgtaggtgagctcgtcggggtcgctgagcccgtgctgctcgagcgcccagtcggcgagatgggggttggcgcggaggaaggaagtccagagatccacggccagggcggtttgcagacggtcccggtactgacggaactgctgcccgacggccattttttcgggggtgacgcagtagaaggtgcgggggtccccgtgccagcgatcccatttgagctggagggcgagatcgagggcgagctcgacgagccggtcgtccccggagagtttcatgaccagcatgaaggggacgagctgcttgccgaaggaccccatccaggtgtaggtttccacatcgtaggtgaggaagagcctttcggtgcgaggatgcgagccgatggggaagaactggatctcctgccaccaattggaggaatggctgttgatgtgatggaagtagaaatgccgacggcgcgccgaacactcgtgcttgtgtttatacaagcggccacagtgctcgcaacgctgcacgggatgcacgtgctgcacgagctgtacctgagttcctttgacgaggaatttcagtgggaagtggagtcgtggcgcctgcatctcgtgctgtactacgtcgtggtggtcggcctggccctcttctgcctcgatggtggtcatgctgacgagcccgcgcgggaggcaggtccagacctcggcgcgagcgggtcggagagcgaggacgagggcgcgcaggccggagctgtccagggtcctgagacgctgcggagtcaggtcagtgggcagcggcggcgcgcggttgacttgcaggagtttttccagggcgcgcgggaggtccagatggtacttgatctccaccgcgccattggtggcgacgtcgatggcttgcagggtcccgtgcccctggggtgtgaccaccgtcccccgtttcttcttgggcggctggggcgacgggggcggtgcctcttccatggttagaagcggcggcgaggacgcgcgccgggcggcaggggcggctcggggcccggaggcaggggcggcaggggcacgtcggcgccgcgcgcgggtaggttctggtactgcgcccggagaagactggcgtgagcgacgacgcgacggttgacgtcctggatctgacgcctctgggtgaaggccacgggacccgtgagtttgaacctgaaagagagttcgacagaatcaatctcggtatcgttgacggcggcctgccgcaggatctcttgcacgtcgcccgagttgtcctggtaggcgatctcggtcatgaactgctcgatctcctcctcttgaaggtctccgcggccggcgcgctccacggtggccgcgaggtcgttggagatgcggcccatgagctgcgagaaggcgttcatgcccgcctcgttccagacgcggctgtagaccacgacgccctcgggatcgcgggcgcgcatgaccacctgggcgaggttgagctccacgtggcgcgtgaagaccgcgtagttgcagaggcgctggtagaggtagttgagcgtggtggcgatgtgctcggtgacgaagaaatacatgatccagcggcggagcggcatctcgctgacgtcgcccagcgcctccaaacgttccatggcctcgtaaaagtccacggcgaagttgaaaaactgggagttgcgcgccgagacggtcaactcctcctccagaagacggatgagctcggcgatggtggcgcgcacctcgcgctcgaaggcccccgggagttcctccacttcctcttcttcctcctccactaacatctcttctacttcctcctcaggcggcagtggtggcgggggagggggcctgcgtcgccggcggcgcacgggcagacggtcgatgaagcgctcgatggtctcgccgcgccggcgtcgcatggtctcggtgacggcgcgcccgtcctcgcggggccgcagcgtgaagacgccgccgcgcatctccaggtggccgggggggtccccgttgggcagggagagggcgctgacgatgcatcttatcaattgccccgtagggactccgcgcaaggacctgagcgtctcgagatccacgggatctgaaaaccgctgaacgaaggcttcgagccagtcgcagtcgcaaggtaggctgagcacggtttcttctggcgggtcatgttggttgggagcggggcgggcgatgctgctggtgatgaagttgaaataggcggttctgagacggcggatggtggcgaggagcaccaggtctttgggcccggcttgctggatgcgcagacggtcggccatgccccaggcgtggtcctgacacctggccaggtccttgtagtagtcctgcatgagccgctccacgggcacctcctcctcgcccgcgcggccgtgcatgcgcgtgagcccgaagccgcgctggggctggacgagcgccaggtcggcgacgacgcgctcggcgaggatggcttgctggatctgggtgagggtggtctggaagtcatcaaagtcgacgaagcggtggtaggctccggtgttgatggtgtaggagcagttggccatgacggaccagttgacggtctggtggcccggacgcacgagctcgtggtacttgaggcgcgagtaggcgcgcgtgtcgaagatgtagtcgttgcaggtgcgcaccaggtactggtagccgatgaggaagtgcggcggcggctggcggtagagcggccatcgctcggtggcgggggcgccgggcgcgaggtcctcgagcatggtgcggtggtagccgtagatgtacctggacatccaggtgatgccggcggcggtggtggaggcgcgcgggaactcgcggacgcggttccagatgttgcgcagcggcaggaagtagttcatggtgggcacggtctggcccgtgaggcgcgcgcagtcgtggatgctctatacgggcaaaaacgaaagcggtcagcggctcgactccgtggcctggaggctaagcgaacgggttgggctgcgcgtgtaccccggttcgaatctcgaatcaggctggagccgcagctaacgtggtattggcactcccgtctcgacccaagcctgcaccaaccctccaggatacggaggcgggtcgttttgcaacttttttttggaggccggatgagactagtaagcgcggaaagcggccgaccgcgatggctcgctgccgtagtctggagaagaatcgccagggttgcgttgcggtgtgccccggttcgaggccggccggattccgcggctaacgagggcgtggctgccccgtcgtttccaagaccccatagccagccgacttctccagttacggagcgagcccctcttttgttttgtttgtttttgccagatgcatcccgtactgcggcagatgcgcccccaccaccctccaccgcaacaacagccccctccacagccggcgcttctgcccccgccccagcagcaacttccagccacgaccgccgcggccgccgtgagcggggctggacagagttatgatcaccagctggccttggaagagggcgaggggctggcgcgcctgggggcgtcgtcgccggagcggcacccgcgcgtgcagatgaaaagggacgctcgcgaggcctacgtgcccaagcagaacctgttcagagacaggagcggcgaggagcccgaggagatgcgcgcggcccggttccacgcggggcgggagctgcggcgcggcctggaccgaaagagggtgctgagggacgaggatttcgaggcggacgagctgacggggatcagccccgcgcgcgcgcacgtggccgcggccaacctggtcacggcgtacgagcagaccgtgaaggaggagagcaacttccaaaaatccttcaacaaccacgtgcgcaccctgatcgcgcgcgaggaggtgaccctgggcctgatgcacctgtgggacctgctggaggccatcgtgcagaaccccaccagcaagccgctgacggcgcagctgttcctggtggtgcagcatagtcgggacaacgaagcgttcagggaggcgctgctgaatatcaccgagcccgagggccgctggctcctggacctggtgaacattctgcagagcatcgtggtgcaggagcgcgggctgccgctgtccgagaagctggcggccatcaacttctcggtgctgagtttgggcaagtactacgctaggaagatctacaagaccccgtacgtgcccatagacaaggaggtgaagatcgacgggttttacatgcgcatgaccctgaaagtgctgaccctgagcgacgatctgggggtgtaccgcaacgacaggatgcaccgtgcggtgagcgccagcaggcggcgcgagctgagcgaccaggagctgatgcatagtctgcagcgggccctgaccggggccgggaccgagggggagagctactttgacatgggcgcggacctgcactggcagcccagccgccgggccttggaggcggcggcaggaccctacgtagaagaggtggacgatgaggtggacgaggagggcgagtacctggaagactgatggcgcgaccgtatttttgctagatgcaacaacaacagccacctcctgatcccgcgatgcgggcggcgctgcagagccagccgtccggcattaactcctcggacgattggacccaggccatgcaacgcatcatggcgctgacgacccgcaaccccgaagcctttagacagcagccccaggccaaccggctctcggccatcctggaggccgtggtgccctcgcgctccaaccccacgcacgagaaggtcctggccatcgtgaacgcgctggtggagaacaaggccatccgcggcgacgaggccggcctggtgtacaacgcgctgctggagcgcgtggcccgctacaacagcaccaacgtgcagaccaacctggaccgcatggtgaccgacgtgcgcgaggccgtggcccagcgcgagcggttccaccgcgagtccaacctgggatccatggtggcgctgaacgccttcctcagcacccagcccgccaacgtgccccggggccaggaggactacaccaacttcatcagcgccctgcgcctgatggtgaccgaggtgccccagagcgaggtgtaccagtccgggccggactacttcttccagaccagtcgccagggcttgcagaccgtgaacctgagccaggctttcaagaacttgcagggcctgtggggcgtgcaggccccggtcggggaccgcgcgacggtgtcgagcctgctgacgccgaactcgcgcctgctgctgctgctggtggcccccttcacggacagcggcagcatcaaccgcaactcgtacctgggctacctgattaacctgtaccgcgaggccatcggccaggcgcacgtggacgagcagacctaccaggagatcacccacgtgagccgcgccctgggccaggacgacccgggcaacctggaagccaccctgaactttttgctgaccaaccggtcgcagaagatcccgccccagtacgcgctcagcaccgaggaggagcgcatcctgcgttacgtgcagcagagcgtgggcctgttcctgatgcaggagggggccacccccagcgccgcgctcgacatgaccgcgcgcaacatggagcccagcatgtacgccagcaaccgcccgttcatcaataaactgatggactacttgcatcgggcggccgccatgaactctgactatttcaccaacgccatcctgaatccccactggctcccgccgccggggttctacacgggcgagtacgacatgcccgaccccaatgacgggttcctgtgggacgatgtggacagcagcgtgttctccccccgaccgggtgctaacgagcgccccttgtggaagaaggaaggcagcgaccgacgcccgtcctcggcgctgtccggccgcgagggtgctgccgcggcggtgcccgaggccgccagtcctttcccgagcttgcccttctcgctgaacagtatccgcagcagcgagctgggcaggatcacgcgcccgcgcttgctgggcgaagaggagtacttgaatgactcgctgttgagacccgagcgggagaagaacttccccaataacgggatagaaagcctggtggacaagatgagccgctggaagacgtatgcgcaggagcacagggacgatccccgggcgtcgcagggggccacgagccggggcagcgccgcccgtaaacgccggtggcacgacaggcagcggggacagatgtgggacgatgaggactccgccgacgacagcagcgtgttggacttgggtgggagtggtaacccgttcgctcacctgcgcccccgtatcgggcgcatgatgtaagagaaaccgaaaataaatgatactcaccaaggccatggcgaccagcgtgcgttcgtttcttctctgttgttgttgtatctagtatgatgaggcgtgcgtacccggagggtcctcctccctcgtacgagagcgtgatgcagcaggcgatggcggcggcggcgatgcagcccccgctggaggctccttacgtgcccccgcggtacctggcgcctacggaggggcggaacagcattcgttactcggagctggcacccttgtacgataccacccggttgtacctggtggacaacaagtcggcggacatcgcctcgctgaactaccagaacgaccacagcaacttcctgaccaccgtggtgcagaacaatgacttcacccccacggaggccagcacccagaccatcaactttgacgagcgctcgcggtggggcggccagctgaaaaccatcatgcacaccaacatgcccaacgtgaacgagttcatgtacagcaacaagttcaaggcgcgggtgatggtctcccgcaagacccccaatggggtgacagtgacagaggattatgatggtagtcaggatgagctgaagtatgaatgggtggaatttgagctgcccgaaggcaacttctcggtgaccatgaccatcgacctgatgaacaacgccatcatcgacaattacttggcggtggggcggcagaacggggtgctggagagcgacatcggcgtgaagttcgacactaggaacttcaggctgggctgggaccccgtgaccgagctggtcatgcccggggtgtacaccaacgaggctttccatcccgatattgtcttgctgcccggctgcggggtggacttcaccgagagccgcctcagcaacctgctgggcattcgcaagaggcagcccttccaggaaggcttccagatcatgtacgaggatctggaggggggcaacatccccgcgctcctggatgtcgacgcctatgagaaaagcaaggaggatgcagcagctgaagcaactgcagccgtagctaccgcctctaccgaggtcaggggcgataattttgcaagcgccgcagcagtggcagcggccgaggcggctgaaaccgaaagtaagatagtcattcagccggtggagaaggatagcaagaacaggagctacaacgtactaccggacaagataaacaccgcctaccgcagctggtacctagcctacaactatggcgaccccgagaagggcgtgcgctcctggacgctgctcaccacctcggacgtcacctgcggcgtggagcaagtctactggtcgctgcccgacatgatgcaagacccggtcaccttccgctccacgcgtcaagttagcaactacccggtggtgggcgccgagctcctgcccgtctactccaagagcttcttcaacgagcaggccgtctactcgcagcagctgcgcgccttcacctcgcttacgcacgtcttcaaccgcttccccgagaaccagatcctcgtccgcccgcccgcgcccaccattaccaccgtcagtgaaaacgttcctgctctcacagatcacgggaccctgccgctgcgcagcagtatccggggagtccagcgcgtgaccgttactgacgccagacgccgcacctgcccctacgtctacaaggccctgggcatagtcgcgccgcgcgtcctctcgagccgcaccttctaaatgtccattctcatctcgcccagtaataacaccggttggggcctgcgcgcgcccagcaagatgtacggaggcgctcgccaacgctccacgcaacaccccgtgcgcgtgcgcgggcacttccgcgctccctggggcgccctcaagggccgcgtgcggtcgcgcaccaccgtcgacgacgtgatcgaccaggtggtggccgacgcgcgcaactacacccccgccgccgcgcccgtctccaccgtggacgccgtcatcgacagcgtggtggccgacgcgcgccggtacgcccgcgccaagagccggcggcggcgcatcgcccggcggcaccggagcacccccgccatgcgcgcggcgcgagccttgctgcgcagggccaggcgcacgggacgcagggccatgctcagggcggccagacgcgcggcttcaggcgccagcgccggcaggacccggagacgcgcggccacggcggcggcagcggccatcgccagcatgtcccgcccgcggcgagggaacgtgtactgggtgcgcgacgccgccaccggtgtgcgcgtgcccgtgcgcacccgcccccctcgcacttgaagatgttcacttcgcgatgttgatgtgtcccagcggcgaggaggatgtccaagcgcaaattcaaggaagagatgctccaggtcatcgcgcctgagatctacggccctgcggtggtgaaggaggaaagaaagccccgcaaaatcaagcgggtcaaaaaggacaaaaaggaagaagaaagtgatgtggacggattggtggagtttgtgcgcgagttcgccccccggcggcgcgtgcagtggcgcgggcggaaggtgcaaccggtgctgagacccggcaccaccgtggtcttcacgcccggcgagcgctccggcaccgcttccaagcgctcctacgacgaggtgtacggggatgatgatattctggagcaggcggccgagcgcctgggcgagtttgcttacggcaagcgcagccgttccgcaccgaaggaagaggcggtgtccatcccgctggaccacggcaaccccacgccgagcctcaagcccgtgaccttgcagcaggtgctgccgaccgcggcgccgcgccgggggttcaagcgcgagggcgaggatctgtaccccaccatgcagctgatggtgcccaagcgccagaagctggaagacgtgctggagaccatgaaggtggacccggacgtgcagcccgaggtcaaggtgcggcccatcaagcaggtggccccgggcctgggcgtgcagaccgtggacatcaagattcccacggagcccatggaaacgcagaccgagcccatgatcaagcccagcaccagcaccatggaggtgcagacggatccctggatgccatcggctcctagtcgaagaccccggcgcaagtacggcgcggccagcctgctgatgcccaactacgcgctgcatccttccatcatccccacgccgggctaccgcggcacgcgcttctaccgcggtcataccagcagccgccgccgcaagaccaccactcgccgccgccgtcgccgcaccgccgctgcaaccacccctgccgccctggtgcggagagtgtaccgccgcggccgcgcacctctgaccctgccgcgcgcgcgctaccacccgagcatcgccatttaaactttcgcctgctttgcagatcaatggccctcacatgccgccttcgcgttcccattacgggctaccgaggaagaaaaccgcgccgtagaaggctggcggggaacgggatgcgtcgccaccaccaccggcggcggcgcgccatcagcaagcggttggggggaggcttcctgcccgcgctgatccccatcatcgccgcggcgatcggggcgatccccggcattgcttccgtggcggtgcaggcctctcagcgccactgagacacacttggaaacatcttgtaataaaccaatggactctgacgctcctggtcctgtgatgtgttttcgtagacagatggaagacatcaatttttcgtccctggctccgcgacacggcacgcggccgttcatgggcacctggagcgacatcggcaccagccaactgaacgggggcgccttcaattggagcagtctctggagcgggcttaagaatttcgggtccacgcttaaaacctatggcagcaaggcgtggaacagcaccacagggcaggcgctgagggataagctgaaagagcagaacttccagcagaaggtggtcgatgggctcgcctcgggcatcaacggggtggtggacctggccaaccaggccgtgcagcggcagatcaacagccgcctggacccggtgccgcccgccggctccgtggagatgccgcaggtggaggaggagctgcctcccctggacaagcggggcgagaagcgaccccgccccgatgcggaggagacgctgctgacgcacacggacgagccgcccccgtacgaggaggcggtgaaactgggtctgcccaccacgcggcccatcgcgcccctggccaccggggtgctgaaacccgaaaagcccgcgaccctggacttgcctcctccccagccttcccgcccctctacagtggctaagcccctgccgccggtggccgtggcccgcgcgcgacccgggggcaccgcccgccctcatgcgaactggcagagcactctgaacagcatcgtgggtctgggagtgcagagtgtgaagcgccgccgctgctattaaacctaccgtagcgcttaacttgcttgtctgtgtgtgtatgtattatgtcgccgccgccgctgtccaccagaaggaggagtgaagaggcgcgtcgccgagttgcaagatggccaccccatcgatgctgccccagtgggcgtacatgcacatcgccggacaggacgcttcggagtacctgagtccgggtctggtgcagtttgcccgcgccacagacacctacttcagtctggggaacaagtttaggaaccccacggtggcgcccacgcacgatgtgaccaccgaccgcagccagcggctgacgctgcgcttcgtgcccgtggaccgcgaggacaacacctactcgtacaaagtgcgctacacgctggccgtgggcgacaaccgcgtgctggacatggccagcacctactttgacatccgcggcgtgctggatcggggccctagcttcaaaccctactccggcaccgcctacaacagtctggcccccaagggagcacccaacacttgtcagtggacatataaagccgatggtgaaactgccacagaaaaaacctatacatatggaaatgcacccgtgcagggcattaacatcacaaaagatggtattcaacttggaactgacaccgatgatcagccaatctacgcagataaaacctatcagcctgaacctcaagtgggtgatgctgaatggcatgacatcactggtactgatgaaaagtatggaggcagagctcttaagcctgataccaaaatgaagccttgttatggttcttttgccaagcctactaataaagaaggaggtcaggcaaatgtgaaaacaggaacaggcactactaaagaatatgacatagacatggctttctttgacaacagaagtgcggctgctgctggcctagctccagaaattgttttgtatactgaaaatgtggatttggaaactccagatacccatattgtatacaaagcaggcacagatgacagcagctcttctattaatttgggtcagcaagccatgcccaacagacctaactacattggtttcagagacaactttatcgggctcatgtactacaacagcactggcaatatgggggtgctggccggtcaggcttctcagctgaatgctgtggttgacttgcaagacagaaacaccgagctgtcctaccagctcttgcttgactctctgggtgacagaacccggtatttcagtatgtggaatcaggcggtggacagctatgatcctgatgtgcgcattattgaaaatcatggtgtggaggatgaacttcccaactattgtttccctctggatgctgttggcagaacagatacttatcagggaattaaggctaatggaactgatcaaaccacatggaccaaagatgacagtgtcaatgatgctaatgagataggcaagggtaatccattcgccatggaaatcaacatccaagccaacctgtggaggaacttcctctacgccaacgtggccctgtacctgcccgactcttacaagtacacgccggccaatgttaccctgcccaccaacaccaacacctacgattacatgaacggccgggtggtggcgccctcgctggtggactcctacatcaacatcggggcgcgctggtcgctggatcccatggacaacgtgaaccccttcaaccaccaccgcaatgcggggctgcgctaccgctccatgctcctgggcaacgggcgctacgtgcccttccacatccaggtgccccagaaatttttcgccatcaagagcctcctgctcctgcccgggtcctacacctacgagtggaacttccgcaaggacgtcaacatgatcctgcagagctccctcggcaacgacctgcgcacggacggggcctccatctccttcaccagcatcaacctctacgccaccttcttccccatggcgcacaacacggcctccacgctcgaggccatgctgcgcaacgacaccaacgaccagtccttcaacgactacctctcggcggccaacatgctctaccccatcccggccaacgccaccaacgtgcccatctccatcccctcgcgcaactgggccgccttccgcggctggtccttcacgcgtctcaagaccaaggagacgccctcgctgggctccgggttcgacccctacttcgtctactcgggctccatcccctacctcgacggcaccttctacctcaaccacaccttcaagaaggtctccatcaccttcgactcctccgtcagctggcccggcaacgaccggctcctgacgcccaacgagttcgaaatcaagcgcaccgtcgacggcgagggctacaacgtggcccagtgcaacatgaccaaggactggttcctggtccagatgctggcccactacaacatcggctaccagggcttctacgtgcccgagggctacaaggaccgcatgtactccttcttccgcaacttccagcccatgagccgccaggtggtggacgaggtcaactacaaggactaccaggccgtcaccctggcctaccagcacaacaactcgggcttcgtcggctacctcgcgcccaccatgcgccagggccagccctaccccgccaactacccctacccgctcatcggcaagagcgccgtcaccagcgtcacccagaaaaagttcctctgcgacagggtcatgtggcgcatccccttctccagcaacttcatgtccatgggcgcgctcaccgacctcggccagaacatgctctatgccaactccgcccacgcgctagacatgaatttcgaagtcgaccccatggatgagtccacccttctctatgttgtcttcgaagtcttcgacgtcgtccgagtgcaccagccccaccgcggcgtcatcgaggccgtctacctgcgcacccccttctcggccggtaacgccaccacctaagctcttgcttcttgcaagccatggccgcgggctccggcgagcaggagctcagggccatcatccgcgacctgggctgcgggccctacttcctgggcaccttcgataagcgcttcccgggattcatggccccgcacaagctggcctgcgccatcgtcaacacggccggccgcgagaccgggggcgagcactggctggccttcgcctggaacccgcgctcgaacacctgctacctcttcgaccccttcgggttctcggacgagcgcctcaagcagatctaccagttcgagtacgagggcctgctgcgccgcagcgccctggccaccgaggaccgctgcgtcaccctggaaaagtccacccagaccgtgcagggtccgcgctcggccgcctgcgggctcttctgctgcatgttcctgcacgccttcgtgcactggcccgaccgccccatggacaagaaccccaccatgaacttgctgacgggggtgcccaacggcatgctccagtcgccccaggtggaacccaccctgcgccgcaaccaggaggcgctctaccgcttcctcaactcccactccgcctactttcgctcccaccgcgcgcgcatcgagaaggccaccgccttcgaccgcatgaatcaagacatgtaaaccgtgtgtgtatgttaaatgtctttaataaacagcactttcatgttacacatgcatctgagatgatttatttagaaatcgaaagggttctgccgggtctcggcatggcccgcgggcagggacacgttgcggaactggtacttggccagccacttgaactcggggatcagcagtttgggcagcggggtgtcggggaaggagtcggtccacagcttccgcgtcagttgcagggcgcccagcaggtcgggcgcggagatcttgaaatcgcagttgggacccgcgttctgcgcgcgggagttgcggtacacggggttgcagcactggaacaccatcagggccgggtgcttcacgctcgccagcaccgtcgcgtcggtgatgctctccacgtcgaggtcctcggcgttggccatcccgaagggggtcatcttgcaggtctgccttcccatggtgggcacgcacccgggcttgtggttgcaatcgcagtgcagggggatcagcatcatctgggcctggtcggcgttcatccccgggtacatggccttcatgaaagcctccaattgcctgaacgcctgctgggccttggctccctcggtgaagaagaccccgcaggacttgctagagaactggttggtggcgcacccggcgtcgtgcacgcagcagcgcgcgtcgttgttggccagctgcaccacgctgcgcccccagcggttctgggtgatcttggcccggtcggggttctccttcagcgcgcgctgcccgttctcgctcgccacatccatctcgatcatgtgctccttctggatcatggtggtcccgtgcaggcaccgcagcttgccctcggcctcggtgcacccgtgcagccacagcgcgcacccggtgcactcccagttcttgtgggcgatctgggaatgcgcgtgcacgaagccctgcaggaagcggcccatcatggtggtcagggtcttgttgctagtgaaggtcagcggaatgccgcggtgctcctcgttgatgtacaggtggcagatgcggcggtacacctcgccctgctcgggcatcagctggaagttggctttcaggtcggtctccacgcggtagcggtccatcagcatagtcatgatttccatacccttctcccaggccgagacgatgggcaggctcatagggttcttcaccatcatcttagcgctagcagccgcggccagggggtcgctctcgtccagggtctcaaagctccgcttgccgtccttctcggtgatccgcaccggggggtagctgaagcccacggccgccagctcctcctcggcctgtctttcgtcctcgctgtcctggctgacgtcctgcaggaccacatgcttggtcttgcggggtttcttcttgggcggcagcggcggcggagatgttggagatggcgagggggagcgcgagttctcgctcaccactactatctcttcctcttcttggtccgaggccacgcggcggtaggtatgtctcttcgggggcagaggcggaggcgacgggctctcgccgccgcgacttggcggatggctggcagagccccttccgcgttcgggggtgcgctcccggcggcgctctgactgacttcctccgcggccggccattgtgttctcctagggaggaacaacaagcatggagactcagccatcgccaacctcgccatctgcccccaccgccgacgagaagcagcagcagcagaatgaaagcttaaccgccccgccgcccagccccgccacctccgacgcggccgtcccagacatgcaagagatggaggaatccatcgagattgacctgggctatgtgacgcccgcggagcacgaggaggagctggcagtgcgcttttcacaagaagagatacaccaagaacagccagagcaggaagcagagaatgagcagagtcaggctgggctcgagcatgacggcgactacctccacctgagcgggggggaggacgcgctcatcaagcatctggcccggcaggccaccatcgtcaaggatgcgctgctcgaccgcaccgaggtgcccctcagcgtggaggagctcagccgcgcctacgagttgaacctcttctcgccgcgcgtgccccccaagcgccagcccaatggcacctgcgagcccaacccgcgcctcaacttctacccggtcttcgcggtgcccgaggccctggccacctaccacatctttttcaagaaccaaaagatccccgtctcctgccgcgccaaccgcacccgcgccgacgcccttttcaacctgggtcccggcgcccgcctacctgatatcgcctccttggaagaggttcccaagatcttcgagggtctgggcagcgacgagactcgggccgcgaacgctctgcaaggagaaggaggagagcatgagcaccacagcgccctggtcgagttggaaggcgacaacgcgcggctggcggtgctcaaacgcacggtcgagctgacccatttcgcctacccggctctgaacctgccccccaaagtcatgagcgcggtcatggaccaggtgctcatcaagcgcgcgtcgcccatctccgaggacgagggcatgcaagactccgaggagggcaagcccgtggtcagcgacgagcagctggcccggtggctgggtcctaatgctagtccccagagtttggaagagcggcgcaaactcatgatggccgtggtcctggtgaccgtggagctggagtgcctgcgccgcttcttcgccgacgcggagaccctgcgcaaggtcgaggagaacctgcactacctcttcaggcacgggttcgtgcgccaggcctgcaagatctccaacgtggagctgaccaacctggtctcctacatgggcatcttgcacgagaaccgcctggggcagaacgtgctgcacaccaccctgcgcggggaggcccggcgcgactacatccgcgactgcgtctacctctacctctgccacacctggcagacgggcatgggcgtgtggcagcagtgtctggaggagcagaacctgaaagagctctgcaagctcctgcagaagaacctcaagggtctgtggaccgggttcgacgagcgcaccaccgcctcggacctggccgacctcattttccccgagcgcctcaggctgacgctgcgcaacggcctgcccgactttatgagccaaagcatgttgcaaaactttcgctctttcatcctcgaacgctccggaatcctgcccgccacctgctccgcgctgccctcggacttcgtgccgctgaccttccgcgagtgccccccgccgctgtggagccactgctacctgctgcgcctggccaactacctggcctaccactcggacgtgatcgaggacgtcagcggcgagggcctgctcgagtgccactgccgctgcaacctctgcacgccgcaccgctccctggcctgcaacccccagctgctgagcgagacccagatcatcggcaccttcgagttgcaagggcccagcgaaggcgagggttcagccgccaaggggggtctgaaactcaccccggggctgtggacctcggcctacttgcgcaagttcgtgcccgaggactaccatcccttcgagatcaggttctacgaggaccaatcccatccgcccaaggccgagctgtcggcctgcgtcatcacccagggggcgatcctggcccaattgcaagccatccagaaatcccgccaagaattcttgctgaaaaagggccgcggggtctacctcgacccccagaccggtgaggagctcaaccccggcttcccccaggatgccccgaggaaacaagaagctgaaagtggagctgccgcccgtggaggatttggaggaagactgggagaacagcagtcaggcagaggaggaggagatggaggaagactgggacagcactcaggcagaggaggacagcctgcaagacagtctggaggaagacgaggaggaggcagaggaggaggtggaagaagcagccgccgccagaccgtcgtcctcggcgggggagaaagcaagcagcacggataccatctccgctccgggtcggggtcccgctcgaccacacagtagatgggacgagaccggacgattcccgaaccccaccacccagaccggtaagaaggagcggcagggatacaagtcctggcgggggcacaaaaacgccatcgtctcctgcttgcaggcctgcgggggcaacatctccttcacccggcgctacctgctcttccaccgcggggtgaactttccccgcaacatcttgcattactaccgtcacctccacagcccctactacttccaagaagaggcagcagcagcagaaaaagaccagcagaaaaccagcagctagaaaatccacagcggcggcagcaggtggactgaggatcgcggcgaacgagccggcgcaaacccgggagctgaggaaccggatctttcccaccctctatgccatcttccagcagagtcgggggcaggagcaggaactgaaagtcaagaaccgttctctgcgctcgctcacccgcagttgtctgtatcacaagagcgaagaccaacttcagcgcactctcgaggacgccgaggctctcttcaacaagtactgcgcgctcactcttaaagagtagcccgcgcccgcccagtcgcagaaaaaggcgggaattacgtcacctgtgcccttcgccctagccgcctccacccatcatcatgagcaaagagattcccacgccttacatgtggagctaccagccccagatgggcctggccgccggtgccgcccaggactactccacccgcatgaattggctcagcgccgggcccgcgatgatctcacgggtgaatgacatccgcgcccaccgaaaccagatactcctagaacagtcagcgctcaccgccacgccccgcaatcacctcaatccgcgtaattggcccgccgccctggtgtaccaggaaattccccagcccacgaccgtactacttccgcgagacgcccaggccgaagtccagctgactaactcaggtgtccagctggcgggcggcgccaccctgtgtcgtcaccgccccgctcagggtataaagcggctggtgatccggggcagaggcacacagctcaacgacgaggtggtgagctcttcgctgggtctgcgacctgacggagtcttccaactcgccggatcggggagatcttccttcacgcctcgtcaggccgtcctgactttggagagttcgtcctcgcagccccgctcgggtggcatcggcactctccagttcgtggaggagttcactccctcggtctacttcaaccccttctccggctcccccggccactacccggacgagttcatcccgaacttcgacgccatcagcgagtcggtggacggctacgattgaatgtcccatggtggcgcagctgacctagctcggcttcgacacctggaccactgccgccgcttccgctgcttcgctcgggatctcgccgagtttgcctactttgagctgcccgaggagcaccctcagggcccggcccacggagtgcggatcgtcgtcgaagggggcctcgactcccacctgcttcggatcttcagccagcgtccgatcctggtcgagcgcgagcaaggacagacccttctgactctgtactgcatctgcaaccaccccggcctgcatgaaagtctttgttgtctgctgtgtactgagtataataaaagctgagatcagcgactactccggacttccgtgtgtttaaactcacccccttatccagtgaaataaagatcatattgatgatgattttacagaaataaaaaataatcatttgatttgaaataaagatacaatcatattgatgatttgagtttaacaaaaaaataaagaatcacttacttgaaatctgataccaggtctctgtccatgttttctgccaacaccacttcactcccctcttcccagctctggtactgcaggccccggcgggctgcaaacttcctccacacgctgaaggggatgtcaaattcctcctgtccctcaatcttcattttatcttctatcagatgtccaaaaagcgcgtccgggtggatgatgacttcgaccccgtctacccctacgatgcagacaacgcaccgaccgtgcccttcatcaacccccccttcgtctcttcagatggattccaagagaagcccctgggggtgttgtccctgcgactggccgaccccgtcaccaccaagaacggggaaatcaccctcaagctgggagagggggtggacctcgattcctcgggaaaactcatctccaacacggccaccaaggccgccgcccctctcagtttttccaacaacaccatttcccttaacatggatcaccccttttacactaaagatggaaaattatccttacaagtttctccaccattaaatatactgagaacaagcattctaaacacactagctttaggttttggatcaggtttaggactccgtggctctgccttggcagtacagttagtctctccacttacatttgatactgatggaaacataaagcttaccttagacagaggtttgcatgttacaacaggagatgcaattgaaagcaacataagctgggctaaaggtttaaaatttgaagatggagccatagcaaccaacattggaaatgggttagagtttggaagcagtagtacagaaacaggtgttgatgatgcttacccaatccaagttaaacttggatctggccttagctttgacagtacaggagccataatggctggtaacaaagaagacgataaactcactttgtggacaacacctgatccatcaccaaactgtcaaatactcgcagaaaatgatgcaaaactaacactttgcttgactaaatgtggtagtcaaatactggccactgtgtcagtcttagttgtaggaagtggaaacctaaaccccattactggcaccgtaagcagtgctcaggtgtttctacgttttgatgcaaacggtgttcttttaacagaacattctacactaaaaaaatactgggggtataggcagggagatagcatagatggcactccatataccaatgctgtaggattcatgcccaatttaaaagcttatccaaagtcacaaagttctactactaaaaataatatagtagggcaagtatacatgaatggagatgtttcaaaacctatgcttctcactataaccctcaatggtactgatgacagcaacagtacatattcaatgtcattttcatacacctggactaatggaagctatgttggagcaacatttggggctaactcttataccttctcatacatcgcccaagaatgaacactgtatcccaccctgcatgccaacccttcccaccccactctgtggaacaaactctgaaacacaaaataaaataaagttcaagtgttttattgattcaacagttttacaggattcgagcagttatttttcctccaccctcccaggacatggaatacaccaccctctccccccgcacagccttgaacatctgaatgccattggtgatggacatgcttttggtctccacgttccacacagtttcagagcgagccagtctcgggtcggtcagggagatgaaaccctccgggcactcccgcatctgcacctcacagctcaacagctgaggattgtcctcggtggtcgggatcacggttatctggaagaagcagaagagcggcggtgggaatcatagtccgcgaacgggatcggccggtggtgtcgcatcaggccccgcagcagtcgctgccgccgccgctccgtcaagctgctgctcagggggtccgggtccagggactccctcagcatgatgcccacggccctcagcatcagtcgtctggtgcggcgggcgcagcagcgcatgcggatctcgctcaggtcgctgcagtacgtgcaacacagaaccaccaggttgttcaacagtccatagttcaacacgctccagccgaaactcatcgcgggaaggatgctacccacgtggccgtcgtaccagatcctcaggtaaatcaagtggtgccccctccagaacacgctgcccacgtacatgatctccttgggcatgtggcggttcaccacctcccggtaccacatcaccctctggttgaacatgcagccccggatgatcctgcggaaccacagggccagcaccgccccgcccgccatgcagcgaagagaccccgggtcccggcaatggcaatggaggacccaccgctcgtacccgtggatcatctgggagctgaacaagtctatgttggcacagcacaggcatatgctcatgcatctcttcagcactctcaactcctcgggggtcaaaaccatatcccagggcacggggaactcttgcaggacagcgaaccccgcagaacagggcaatcctcgcacagaacttacattgtgcatggacagggtatcgcaatcaggcagcaccgggtgatcctccaccagagaagcgcgggtctcggtctcctcacagcgtggtaagggggccggccgatacgggtgatggcgggacgcggctgatcgtgttcgcgaccgtgtcatgatgcagttgctttcggacattttcgtacttgctgtagcagaacctggtccgggcgctgcacaccgatcgccggcggcggtctcggcgcttggaacgctcggtgttgaaattgtaaaacagccactctctcagaccgtgcagcagatctagggcctcaggagtgatgaagatcccatcatgcctgatggctctgatcacatcgaccaccgtggaatgggccagacccagccagatgatgcaattttgttgggtttcggtgacggcgggggagggaagaacaggaagaaccatgattaacttttaatccaaacggtctcggagtacttcaaaatgaagatcgcggagatggcacctctcgcccccgctgtgttggtggaaaataacagccaggtcaaaggtgatacggttctcgagatgttccacggtggcttccagcaaagcctccacgcgcacatccagaaacaagacaatagcgaaagcgggagggttctctaattcctcaatcatcatgttacactcctgcaccatccccagataattttcatttttccagccttgaatgattcgaactagttcctgaggtaaatccaagccagccatgataaagagctcgcgcagagcgccctccaccggcattcttaagcacaccctcataattccaagatattctgctcctggttcacctgcagcagattgacaagcggaatatcaaaatctctgccgcgatccctgagctcctccctcagcaataactgtaagtactctttcatatcctctccgaaatttttagccataggaccaccaggaataagattagggcaagccacagtacagataaaccgaagtcctccccagtgagcattgccaaatgcaagactgctataagcatgctggctagacccggtgatatcttccagataactggacagaaaatcgcccaggcaatttttaagaaaatcaacaaaagaaaaatcctccaggtggacgtttagagcctcgggaacaacgatgaagtaaatgcaagcggtgcgttccagcatggttagttagctgatctgtagaaaaaacaaaaatgaacattaaaccatgctagcctggcgaacaggtgggtaaatcgttctctccagcaccaggcaggccacggggtctccggcgcgaccctcgtaaaaattgtcgctatgattgaaaaccatcacagagagacgttcccggtggccggcgtgaatgattcgacaagatgaatacacccccggaacattggcgtccgcgagtgaaaaaaagcgcccgaggaagcaataaggcactacaatgctcagtctcaagtccagcaaagcgatgccatgcggatgaagcacaaaattctcaggtgcgtacaaaatgtaattactcccctcctgcacaggcagcaaagcccccgatccctccaggtacacatacaaagcctcagcgtccatagcttaccgagcagcagcacacaacaggcgcaagagtcagagaaaggctgagctctaacctgtccacccgctctctgctcaatatatagcccagatctacactgacgtaaaggccaaagtctaaaaatacccgccaaataatcacacacgcccagcacacgcccagaaaccggtgacacactcaaaaaaatacgcgcacttcctcaaacgcccaaaactgccgtcatttccgggttcccacgctacgtcatcaaaacacgactttcaaattccgtcgaccgttaaaaacgtcacccgccccgcccctaacggtcgcccgtctctcagccaatcagcgccccgcatccccaaattcaaacacctcatttgcatattaacgcgcacaaaaagtttgaggtatattattgatgatgg

SEQ ID NO: 65 - DNA, 9576 bp, Artificial Sequence
  Synthetic Construct
ggcgtaatgctctgccagtgttacaaccaattaaccaattctgattagaaaaactcatcgagcatcaaatgaaactgcaatttattcatatcaggattatcaataccatatttttgaaaaagccgtttctgtaatgaaggagaaaactcaccgaggcagttccataggatggcaagatcctggtatcggtctgcgattccgactcgtccaacatcaatacaacctattaatttcccctcgtcaaaaataaggttatcaagtgagaaatcaccatgagtgacgactgaatccggtgagaatggcaaaagcttatgcatttctttccagacttgttcaacaggccagccattacgctcgtcatcaaaatcactcgcatcaaccaaaccgttattcattcgtgattgcgcctgagcgagacgaaatacgcgatcgctgttaaaaggacaattacaaacaggaatcaaatgcaaccggcgcaggaacactgccagcgcatcaacaatattttcacctgaatcaggatattcttctaatacctggaatgctgttttcccggggatcgcagtggtgagtaaccatgcatcatcaggagtacggataaaatgcttgatggtcggaagaggcataaattccgtcagccagtttagtctgaccatctcatctgtaacatcattggcaacgctacctttgccatgtttcagaaacaactctggcgcatcgggcttcccatacaatcgatagattgtcgcacctgattgcccgacattatcgcgagcccatttatacccatataaatcagcatccatgttggaatttaatcgcggcctcgagcaagacgtttcccgttgaatatggctcataacaccccttgtattactgtttatgtaagcagacaggtcgacaatattggctattggccattgcatacgttgtatctatatcataatatgtacatttatattggctcatgtccaatatgaccgccatgttgacattgattattgactagttattaatagtaatcaattacggggtcattagttcatagcccatatatggagttccgcgttacataacttacggtaaatggcccgcctggctgaccgcccaacgacccccgcccattgacgtcaataatgacgtatgttcccatagtaacgccaatagggactttccattgacgtcaatgggtggagtatttacggtaaactgcccacttggcagtacatcaagtgtatcatatgccaagtccgccccctattgacgtcaatgacggtaaatggcccgcctggcattatgcccagtacatgaccttacgggactttcctacttggcagtacatctacgtattagtcatcgctattaccatggtgatgcggttttggcagtacaccaatgggcgtggatagcggtttgactcacggggatttccaagtctccaccccattgacgtcaatgggagtttgttttggcaccaaaatcaacgggactttccaaaatgtcgtaataaccccgccccgttgacgcaaatgggcggtaggcgtgtacggtgggaggtctatataagcagagctcgtttagtgaaccgtcagatcgcctggagacgccatccacgctgttttgacctccatagaagacaccgggaccgatccagcctccgcggccgggaacggtgcattggaacgcggattccccgtgccaagagtgactcaccgtccggatctcagcaagcaggtatgtactctccagggtgggcctggcttccccagtcaagactccagggatttgagggacgctgtgggctcttctcttacatgtaccttttgcttgcctcaaccctgactatcttccaggtcaggatcccagagtcaggggtctgtattttcctgctggtggctccagttcaggaacagtaaaccctgctccgaatattgcctctcacatctcgtcaatctccgcgaggactggggaccctgtgacgaacatggctagcacccctggaacccagagccccttcttccttctgctgctgctgaccgtgctgactgtcgtgacaggctctggccacgccagctctacacctggcggcgagaaagagacaagcgccacccagagaagcagcgtgccaagcagcaccgagaagaacgccgtgtccatgaccagctccgtgctgagcagccactctcctggcagcggcagcagcacaacacagggccaggatgtgacactggcccctgccacagaacctgcctctggatctgccgccacctggggacaggacgtgacaagcgtgccagtgaccagacctgccctgggctctacaacaccccctgcccacgatgtgaccagcgcccctgataacaagcctgcccctggaagcacagcccctccagctcatggcgtgacctctgccccagataccagaccagccccaggatctacagccccacccgcacacggcgtgacaagtgcccctgacacaagacccgctccaggctctactgctcctcctgcccatggcgtgacaagcgctcccgatacaaggccagctcctggctccacagcaccaccagcacatggcgtgacatcagctcccgacactagacctgctcccggatcaaccgctccaccagctcacggcgtgaccagcgcacctgataccagacctgctctgggaagcaccgcccctcccgtgcacaatgtgacatctgcttccggcagcgccagcggctctgcctctacactggtgcacaacggcaccagcgccagagccacaacaaccccagccagcaagagcacccccttcagcatccctagccaccacagcgacacccctaccacactggccagccactccaccaagaccgatgcctctagcacccaccactccagcgtgccccctctgaccagcagcaaccacagcacaagcccccagctgtctaccggcgtctcattcttctttctgtccttccacatcagcaacctgcagttcaacagcagcctggaagatcccagcaccgactactaccaggaactgcagcgggatatcagcgagatgttcctgcaaatctacaagcagggcggcttcctgggcctgagcaacatcaagttcagacccggcagcgtggtggtgcagctgaccctggctttccgggaaggcaccatcaacgtgcacgacgtggaaacccagttcaaccagtacaagaccgaggccgccagccggtacaacctgaccatctccgatgtgtccgtgtccgacgtgcccttcccattctctgcccagtctggcgcaggcgtgccaggatggggaattgctctgctggtgctcgtgtgcgtgctggtggccctggccatcgtgtatctgattgccctggccgtgtgccagtgccggcggaagaattacggccagctggacatcttccccgccagagacacctaccaccccatgagcgagtaccccacataccacacccacggcagatacgtgccacccagctccaccgacagatccccctacgagaaagtgtctgccggcaacggcggcagctccctgagctacacaaatcctgccgtggccgctgcctccgccaacctgggatccggcagaatcttcaacgcccactacgccggctacttcgccgacctgctgatccacgacatcgagacaaaccctggccccaagctgaccattgagagcactcccttcaacgtggctgaggggaaggaggtgctgctcctggtgcacaatctgccccagcacctgttcgggtactcctggtacaagggagaacgcgtggacgggaaccggcagatcataggctacgtcatcggaacccagcaggccacacccggtccagcgtacagcggccgggagattatctacccgaacgcctccctgctgatccaaaacatcatccagaacgacaccggtttctacactctgcacgtgattaagtcagatctggtcaacgaagaggccaccggccaattcagggtgtaccccgaactccctaagccgttcatcacctcgaacaacagcaacccggtcgaggatgaagatgcggtggccttgacgtgcgaacctgagatccagaacaccacctacttgtggtgggtgaacaatcagagcctgccagtctccccacgactccagctgtcgaacgacaacaggaccctgactttgctgtccgtgactcggaacgacgtgggcccttatgaatgcggtatccagaacaagctgtccgtggaccacagcgaccctgtgatcctgaacgtcctttacgggccggacgaccccaccatttccccgtcgtacacttactaccggccgggcgtgaacctgtccctgtcgtgccacgctgcctccaatccgccggcccagtactcctggctcatcgacggaaacatccagcagcacacccaagaactgttcatctccaacattaccgagaaaaactcgggactttacacctgtcaagccaacaattccgccagcggccactcccgcaccactgtcaaaactatcactgtgtccgccgaactcccgaagcccagcatcagctccaacaactcgaagcccgtggaggataaggacgctgtcgcgttcacctgtgaaccagaggcacagaataccacctacctttggtgggtcaacggacagtccctgcctgtctcaccgagactgcagctgtcaaacgggaataggactctgaccttgtttaacgtcacccggaacgacgcccgggcctacgtgtgcggcatccagaactccgtgagcgcaaaccggtctgacccagtgaccctggatgtgctgtacggccccgacactccgatcatttcaccccccgattcatcctacctgtccggcgctaacctcaacctctcatgccactccgcatccaaccccagcccgcaatattcgtggcgcattaacggaattcctcagcaacatacccaggtcctgttcattgcgaagatcacccctaacaacaacggaacctacgcctgctttgtgtcaaacctggccactggtagaaacaactccatcgtgaagtccattaccgtgtcggcgtccggatccggcgagggcagaggcagcctgctgacatgtggcgacgtggaagagaaccctggccccggagctgccccggagccggagaggacccccgttggccagggatcgtgggcccatccgggacgcaccaggggaccatccgacaggggattctgtgtggtgtcaccggccaggccagcagaagaggcaaccagcctcgagggagcgttgtctggaaccagacattcccacccgtcggtgggccggcagcaccacgcgggaccaccgtccacttccagaccgccacggccatgggacaccccttgcccgcctgtgtatgccgagactaaacacttcctgtactcatccggagacaaggaacagcttcggccgtccttcctcctgtcgtcgctcagaccgagcctgaccggagcacgcagattggtggaaactatcttccttgggtcacgtccgtggatgccaggtaccccacggcgcctcccgcgcctcccacagagatactggcagatgcggcctctgttcctggaattgctgggaaaccacgctcagtgcccgtacggagtcctgctcaagactcactgccctctgagggcggcggtcactccggcggccggagtgtgcgcacgggagaagccccagggaagcgtggcagctccggaagaggaggacaccgatccgcgccgcctcgtgcaacttctgcgccagcactcctcgccctggcaagtctacgggttcgtccgcgcctgcctgcgccgcctggtgccgcctgggctctggggttcccggcataacgagcgccgcttcctgagaaatactaagaagtttatctcacttggaaaacatgccaagttgtcgctgcaagaactcacgtggaagatgtcagtccgcgattgcgcctggctgcgccgctcgccgggcgtcgggtgtgttccagctgcagaacaccgcctgagagaagaaattctggccaaatttctgcattggctgatgtcagtgtacgtggtcgagctgctgcgctcctttttctacgtcactgagactacctttcaaaagaaccgcctgttcttctaccgcaaatctgtgtggagcaagctgcagtcaatcggcattcgccagcatctgaagagggtgcagctgcgggaactttccgaggcagaagtccgccagcaccgggaggcccggccggcgcttctcacgtcgcgtctgagattcatcccaaagcccgacgggctgaggcctatcgtcaacatggattacgtcgtgggcgctcgcacctttcgccgtgaaaagcgggccgaacgcttgacctcacgggtgaaggccctcttctccgtgctgaactacgagagagcaagacggcctggcctgctgggagcttcggtgctgggactggacgatatccaccgggcttggcggacctttgttctccgggtgagagcccaagaccctccgccggaactgtacttcgtgaaggtggcgatcaccggagcctatgatactattccgcaagatcgactcaccgaagtcatcgcctcgatcatcaaaccgcagaacacttactgcgtcaggcggtacgccgtggtccagaaggccgcgcatggccacgtgagaaaggcgttcaagtcgcacgtgtccactctcaccgacctccagccttacatgaggcaattcgttgcgcatttgcaagagacttcgcccctgagagatgcggtggtcatcgagcagagctccagcctgaacgaagcgagcagcggtctgtttgacgtgttcctccgcttcatgtgtcatcacgcggtgcgaatcaggggaaaatcatacgtgcagtgccagggaatcccacaaggcagcattctgtcgactctcttgtgttccctttgctacggcgatatggaaaacaagctgttcgctgggatcagacgggacgggttgctgctcagactggtggacgacttcctgctggtgactccgcacctcactcacgccaaaacctttctccgcactctggtgaggggagtgccagaatacggctgtgtggtcaatctccggaaaactgtggtgaatttccctgtcgaggatgaggcactcggaggaaccgcatttgtccaaatgccagcacatggcctgttcccatggtgcggtctgctgctggacacccgaactcttgaagtgcagtccgactactccagctatgcccggacgagcatccgcgccagcctcactttcaatcgcggctttaaggccggacgaaacatgcgcagaaagcttttcggagtcctccggcttaaatgccattcgctctttctcgatctccaagtcaattcgctgcagaccgtgtgcacgaacatctacaagatcctgctgctccaagcctaccggttccacgcttgcgtgcttcagctgccgtttcaccaacaggtgtggaagaacccgaccttctttctgcgggtcattagcgatactgcctccctgtgttactcaatcctcaaggcaaagaacgccggaatgtcgctgggtgcgaaaggagccgcgggacctcttcctagcgaagcggtgcagtggctctgccaccaggctttcctcctgaagctgaccaggcacagagtgacctacgtcccgctgctgggctcgctgcgcactgcacagacccagctgtctagaaaactccccggcaccaccctgaccgctctggaagccgccgccaacccagcattgccgtcagatttcaagaccatcttggactgaagatctgggccctaacaaaacaaaaagatggggttattccctaaacttcatgggttacgtaattggaagttgggggacattgccacaagatcatattgtacaaaagatcaaacactgttttagaaaacttcctgtaaacaggcctattgattggaaagtatgtcaaaggattgtgggtcttttgggctttgctgctccatttacacaatgtggatatcctgccttaatgcctttgtatgcatgtatacaagctaaacaggctttcactttctcgccaacttacaaggcctttctaagtaaacagtacatgaacctttaccccgttgctcggcaacggcctggtctgtgccaagtgtttgctgacgcaacccccactggctggggcttggccataggccatcagcgcatgcgtggaacctttgtggctcctctgccgatccatactgcggaactcctagccgcttgttttgctcgcagccggtctggagcaaagctcataggaactgacaattctgtcgtcctctcgcggaaatatacatcgtttcgatctacgtatgatctttttccctctgccaaaaattatggggacatcatgaagccccttgagcatctgacttctggctaataaaggaaatttattttcattgcaatagtgtgttggaattttttgtgtctctcactcggaaggaattctgcattaatgaatcggccaacgcgcggggagaggcggtttgcgtattgggcgctcttccgcttcctcgctcactgactcgctgcgctcggtcgttcggctgcggcgagcggtatcagctcactcaaaggcggtaatacggttatccacagaatcaggggataacgcaggaaagaacatgtgagcaaaaggccagcaaaaggccaggaaccgtaaaaaggccgcgttgctggcgtttttccataggctccgcccccctgacgagcatcacaaaaatcgacgctcaagtcagaggtggcgaaacccgacaggactataaagataccaggcgtttccccctggaagctccctcgtgcgctctcctgttccgaccctgccgcttaccggatacctgtccgcctttctcccttcgggaagcgtggcgctttctcatagctcacgctgtaggtatctcagttcggtgtaggtcgttcgctccaagctgggctgtgtgcacgaaccccccgttcagcccgaccgctgcgccttatccggtaactatcgtcttgagtccaacccggtaagacacgacttatcgccactggcagcagccactggtaacaggattagcagagcgaggtatgtaggcggtgctacagagttcttgaagtggtggcctaactacggctacactagaagaacagtatttggtatctgcgctctgctgaagccagttaccttcggaaaaagagttggtagctcttgatccggcaaacaaaccaccgctggtagcggtggtttttttgtttgcaagcagcagattacgcgcagaaaaaaaggatctcaagaagatcctttgatcttttctacggggtctgacgctcagtggaacgaaaactcacgttaagggattttggtcatgagattatcaaaaaggatcttcacctagatccttttaaattaaaaatgaagttttaaatcaatctaaagtatatatgagtaaacttggtctgacagttaccaatgcttaatcagtgaggcacctatctcagcgatctgtctatttcgttcatccatagttgcctgactc

SEQ ID NO: 66 - DNA, 36088 bp, Artificial Sequence
  Synthetic Construct
ccatcttcaataatatacctcaaactttttgtgcgcgttaatatgcaaatgaggcgtttgaatttggggaggaagggcggtgattggtcgagggatgagcgaccgttaggggcggggcgagtgacgttttgatgacgtggttgcgaggaggagccagtttgcaagttctcgtgggaaaagtgacgtcaaacgaggtgtggtttgaacacggaaatactcaattttcccgcgctctctgacaggaaatgaggtgtttctgggcggatgcaagtgaaaacgggccattttcgcgcgaaaactgaatgaggaagtgaaaatctgagtaatttcgcgtttatggcagggaggagtatttgccgagggccgagtagactttgaccgattacgtgggggtttcgattaccgtgtttttcacctaaatttccgcgtacggtgtcaaagtccggtgtttttactactgtaatagtaatcaattacggggtcattagttcatagcccatatatggagttccgcgttacataacttacggtaaatggcccgcctggctgaccgcccaacgacccccgcccattgacgtcaataatgacgtatgttcccatagtaacgccaatagggactttccattgacgtcaatgggtggagtatttacggtaaactgcccacttggcagtacatcaagtgtatcatatgccaagtacgccccctattgacgtcaatgacggtaaatggcccgcctggcattatgcccagtacatgaccttatgggactttcctacttggcagtacatctacgtattagtcatcgctattaccatggtgatgcggttttggcagtacatcaatgggcgtggatagcggtttgactcacggggatttccaagtctccaccccattgacgtcaatgggagtttgttttggcaccaaaatcaacgggactttccaaaatgtcgtaacaactccgccccattgacgcaaatgggcggtaggcgtgtacggtgggaggtctatataagcagagctgtccctatcagtgatagagatctccctatcagtgatagagagtttagtgaaccgtcagatccgctagggtaccgcgatcaccatggctagcacccctggaacccagagccccttcttccttctgctgctgctgaccgtgctgactgtcgtgacaggctctggccacgccagctctacacctggcggcgagaaagagacaagcgccacccagagaagcagcgtgccaagcagcaccgagaagaacgccgtgtccatgaccagctccgtgctgagcagccactctcctggcagcggcagcagcacaacacagggccaggatgtgacactggcccctgccacagaacctgcctctggatctgccgccacctggggacaggacgtgacaagcgtgccagtgaccagacctgccctgggctctacaacaccccctgcccacgatgtgaccagcgcccctgataacaagcctgcccctggaagcacagcccctccagctcatggcgtgacctctgccccagataccagaccagccccaggatctacagccccacccgcacacggcgtgacaagtgcccctgacacaagacccgctccaggctctactgctcctcctgcccatggcgtgacaagcgctcccgatacaaggccagctcctggctccacagcaccaccagcacatggcgtgacatcagctcccgacactagacctgctcccggatcaaccgctccaccagctcacggcgtgaccagcgcacctgataccagacctgctctgggaagcaccgcccctcccgtgcacaatgtgacatctgcttccggcagcgccagcggctctgcctctacactggtgcacaacggcaccagcgccagagccacaacaaccccagccagcaagagcacccccttcagcatccctagccaccacagcgacacccctaccacactggccagccactccaccaagaccgatgcctctagcacccaccactccagcgtgccccctctgaccagcagcaaccacagcacaagcccccagctgtctaccggcgtctcattcttctttctgtccttccacatcagcaacctgcagttcaacagcagcctggaagatcccagcaccgactactaccaggaactgcagcgggatatcagcgagatgttcctgcaaatctacaagcagggcggcttcctgggcctgagcaacatcaagttcagacccggcagcgtggtggtgcagctgaccctggctttccgggaaggcaccatcaacgtgcacgacgtggaaacccagttcaaccagtacaagaccgaggccgccagccggtacaacctgaccatctccgatgtgtccgtgtccgacgtgcccttcccattctctgcccagtctggcgcaggcgtgccaggatggggaattgctctgctggtgctcgtgtgcgtgctggtggccctggccatcgtgtatctgattgccctggccgtgtgccagtgccggcggaagaattacggccagctggacatcttccccgccagagacacctaccaccccatgagcgagtaccccacataccacacccacggcagatacgtgccacccagctccaccgacagatccccctacgagaaagtgtctgccggcaacggcggcagctccctgagctacacaaatcctgccgtggccgctgcctccgccaacctgggatccggcagaatcttcaacgcccactacgccggctacttcgccgacctgctgatccacgacatcgagacaaaccctggccccaagctgaccattgagagcactcccttcaacgtggctgaggggaaggaggtgctgctcctggtgcacaatctgccccagcacctgttcgggtactcctggtacaagggagaacgcgtggacgggaaccggcagatcataggctacgtcatcggaacccagcaggccacacccggtccagcgtacagcggccgggagattatctacccgaacgcctccctgctgatccaaaacatcatccagaacgacaccggtttctacactctgcacgtgattaagtcagatctggtcaacgaagaggccaccggccaattcagggtgtaccccgaactccctaagccgttcatcacctcgaacaacagcaacccggtcgaggatgaagatgcggtggccttgacgtgcgaacctgagatccagaacaccacctacttgtggtgggtgaacaatcagagcctgccagtctccccacgactccagctgtcgaacgacaacaggaccctgactttgctgtccgtgactcggaacgacgtgggcccttatgaatgcggtatccagaacaagctgtccgtggaccacagcgaccctgtgatcctgaacgtcctttacgggccggacgaccccaccatttccccgtcgtacacttactaccggccgggcgtgaacctgtccctgtcgtgccacgctgcctccaatccgccggcccagtactcctggctcatcgacggaaacatccagcagcacacccaagaactgttcatctccaacattaccgagaaaaactcgggactttacacctgtcaagccaacaattccgccagcggccactcccgcaccactgtcaaaactatcactgtgtccgccgaactcccgaagcccagcatcagctccaacaactcgaagcccgtggaggataaggacgctgtcgcgttcacctgtgaaccagaggcacagaataccacctacctttggtgggtcaacggacagtccctgcctgtctcaccgagactgcagctgtcaaacgggaataggactctgaccttgtttaacgtcacccggaacgacgcccgggcctacgtgtgcggcatccagaactccgtgagcgcaaaccggtctgacccagtgaccctggatgtgctgtacggccccgacactccgatcatttcaccccccgattcatcctacctgtccggcgctaacctcaacctctcatgccactccgcatccaaccccagcccgcaatattcgtggcgcattaacggaattcctcagcaacatacccaggtcctgttcattgcgaagatcacccctaacaacaacggaacctacgcctgctttgtgtcaaacctggccactggtagaaacaactccatcgtgaagtccattaccgtgtcggcgtccggatccggcgagggcagaggcagcctgctgacatgtggcgacgtggaagagaaccctggccccggagctgccccggagccggagaggacccccgttggccagggatcgtgggcccatccgggacgcaccaggggaccatccgacaggggattctgtgtggtgtcaccggccaggccagcagaagaggcaaccagcctcgagggagcgttgtctggaaccagacattcccacccgtcggtgggccggcagcaccacgcgggaccaccgtccacttccagaccgccacggccatgggacaccccttgcccgcctgtgtatgccgagactaaacacttcctgtactcatccggagacaaggaacagcttcggccgtccttcctcctgtcgtcgctcagaccgagcctgaccggagcacgcagattggtggaaactatcttccttgggtcacgtccgtggatgccaggtaccccacggcgcctcccgcgcctcccacagagatactggcagatgcggcctctgttcctggaattgctgggaaaccacgctcagtgcccgtacggagtcctgctcaagactcactgccctctgagggcggcggtcactccggcggccggagtgtgcgcacgggagaagccccagggaagcgtggcagctccggaagaggaggacaccgatccgcgccgcctcgtgcaacttctgcgccagcactcctcgccctggcaagtctacgggttcgtccgcgcctgcctgcgccgcctggtgccgcctgggctctggggttcccggcataacgagcgccgcttcctgagaaatactaagaagtttatctcacttggaaaacatgccaagttgtcgctgcaagaactcacgtggaagatgtcagtccgcgattgcgcctggctgcgccgctcgccgggcgtcgggtgtgttccagctgcagaacaccgcctgagagaagaaattctggccaaatttctgcattggctgatgtcagtgtacgtggtcgagctgctgcgctcctttttctacgtcactgagactacctttcaaaagaaccgcctgttcttctaccgcaaatctgtgtggagcaagctgcagtcaatcggcattcgccagcatctgaagagggtgcagctgcgggaactttccgaggcagaagtccgccagcaccgggaggcccggccggcgcttctcacgtcgcgtctgagattcatcccaaagcccgacgggctgaggcctatcgtcaacatggattacgtcgtgggcgctcgcacctttcgccgtgaaaagcgggccgaacgcttgacctcacgggtgaaggccctcttctccgtgctgaactacgagagagcaagacggcctggcctgctgggagcttcggtgctgggactggacgatatccaccgggcttggcggacctttgttctccgggtgagagcccaagaccctccgccggaactgtacttcgtgaaggtggcgatcaccggagcctatgatactattccgcaagatcgactcaccgaagtcatcgcctcgatcatcaaaccgcagaacacttactgcgtcaggcggtacgccgtggtccagaaggccgcgcatggccacgtgagaaaggcgttcaagtcgcacgtgtccactctcaccgacctccagccttacatgaggcaattcgttgcgcatttgcaagagacttcgcccctgagagatgcggtggtcatcgagcagagctccagcctgaacgaagcgagcagcggtctgtttgacgtgttcctccgcttcatgtgtcatcacgcggtgcgaatcaggggaaaatcatacgtgcagtgccagggaatcccacaaggcagcattctgtcgactctcttgtgttccctttgctacggcgatatggaaaacaagctgttcgctgggatcagacgggacgggttgctgctcagactggtggacgacttcctgctggtgactccgcacctcactcacgccaaaacctttctccgcactctggtgaggggagtgccagaatacggctgtgtggtcaatctccggaaaactgtggtgaatttccctgtcgaggatgaggcactcggaggaaccgcatttgtccaaatgccagcacatggcctgttcccatggtgcggtctgctgctggacacccgaactcttgaagtgcagtccgactactccagctatgcccggacgagcatccgcgccagcctcactttcaatcgcggctttaaggccggacgaaacatgcgcagaaagcttttcggagtcctccggcttaaatgccattcgctctttctcgatctccaagtcaattcgctgcagaccgtgtgcacgaacatctacaagatcctgctgctccaagcctaccggttccacgcttgcgtgcttcagctgccgtttcaccaacaggtgtggaagaacccgaccttctttctgcgggtcattagcgatactgcctccctgtgttactcaatcctcaaggcaaagaacgccggaatgtcgctgggtgcgaaaggagccgcgggacctcttcctagcgaagcggtgcagtggctctgccaccaggctttcctcctgaagctgaccaggcacagagtgacctacgtcccgctgctgggctcgctgcgcactgcacagacccagctgtctagaaaactccccggcaccaccctgaccgctctggaagccgccgccaacccagcattgccgtcagatttcaagaccatcttggactgacgcacctcgagctgatcataatcagccataccacatttgtagaggttttacttgctttaaaaaacctcccacacctccccctgaacctgaaacataaaatgaatgcaattgttgttgttaacttgtttattgcagcttataatggttacaaataaagcaatagcatcacaaatttcacaaataaagcatttttttcactgcattctagttgtggtttgtccaaactcatcaatgtatcttaccaggtgccgagcctgcgagtgcggagggaagcatgccaggttccagcccgtgtgtgtggatgtgacggaggacctgcgacccgatcatttggtgttgccctgcaccgggacggagttcggttccagcggggaagaatctgactagagtgagtagtgttctggggcgggggaggacctgcatgagggccagaataactgaaatctgtgcttttctgtgtgttgcagcagcatgagcggaagcggctcctttgagggaggggtattcagcccttatctgacggggcgtctcccctcctgggcgggagtgcgtcagaatgtgatgggatccacggtggacggccggcccgtgcagcccgcgaactcttcaaccctgacctatgcaaccctgagctcttcgtcgttggacgcagctgccgccgcagctgctgcatctgccgccagcgccgtgcgcggaatggccatgggcgccggctactacggcactctggtggccaactcgagttccaccaataatcccgccagcctgaacgaggagaagctgttgctgctgatggcccagctcgaggccttgacccagcgcctgggcgagctgacccagcaggtggctcagctgcaggagcagacgcgggccgcggttgccacggtgaaatccaaataaaaaatgaatcaataaataaacggagacggttgttgattttaacacagagtctgaatctttatttgatttttcgcgcgcggtaggccctggaccaccggtctcgatcattgagcacccggtggatcttttccaggacccggtagaggtgggcttggatgttgaggtacatgggcatgagcccgtcccgggggtggaggtagctccattgcagggcctcgtgctcgggggtggtgttgtaaatcacccagtcatagcaggggcgcagggcatggtgttgcacaatatctttgaggaggagactgatggccacgggcagccctttggtgtaggtgtttacaaatctgttgagctgggagggatgcatgcggggggagatgaggtgcatcttggcctggatcttgagattggcgatgttaccgcccagatcccgcctggggttcatgttgtgcaggaccaccagcacggtgtatccggtgcacttggggaatttatcatgcaacttggaagggaaggcgtgaaagaatttggcgacgcctttgtgcccgcccaggttttccatgcactcatccatgatgatggcgatgggcccgtgggcggcggcctgggcaaagacgtttcgggggtcggacacatcatagttgtggtcctgggtgaggtcatcataggccattttaatgaatttggggcggagggtgccggactgggggacaaaggtaccctcgatcccgggggcgtagttcccctcacagatctgcatctcccaggctttgagctcggagggggggatcatgtccacctgcggggcgataaagaacacggtttccggggcgggggagatgagctgggccgaaagcaagttccggagcagctgggacttgccgcagccggtggggccgtagatgaccccgatgaccggctgcaggtggtagttgagggagagacagctgccgtcctcccggaggaggggggccacctcgttcatcatctcgcgcacgtgcatgttctcgcgcaccagttccgccaggaggcgctctccccccagggataggagctcctggagcgaggcgaagtttttcagcggcttgagtccgtcggccatgggcattttggagagggtttgttgcaagagttccaggcggtcccagagctcggtgatgtgctctacggcatctcgatccagcagacctcctcgtttcgcgggttgggacggctgcgggagtagggcaccagacgatgggcgtccagcgcagccagggtccggtccttccagggtcgcagcgtccgcgtcagggtggtctccgtcacggtgaaggggtgcgcgccgggctgggcgcttgcgagggtgcgcttcaggctcatccggctggtcgaaaaccgctcccgatcggcgccctgcgcgtcggccaggtagcaattgaccatgagttcgtagttgagcgcctcggccgcgtggcctttggcgcggagcttacctttggaagtctgcccgcaggcgggacagaggagggacttgagggcgtagagcttgggggcgaggaagacggactcgggggcgtaggcgtccgcgccgcagtgggcgcagacggtctcgcactccacgagccaggtgaggtcgggctggtcggggtcaaaaaccagtttcccgccgttctttttgatgcgtttcttacctttggtctccatgagctcgtgtccccgctgggtgacaaagaggctgtccgtgtccccgtagaccgactttatgggccggtcctcgagcggtgtgccgcggtcctcctcgtagaggaaccccgcccactccgagacgaaagcccgggtccaggccagcacgaaggaggccacgtgggacgggtagcggtcgttgtccaccagcgggtccaccttttccagggtatgcaaacacatgtccccctcgtccacatccaggaaggtgattggcttgtaagtgtaggccacgtgaccgggggtcccggccgggggggtataaaagggtgcgggtccctgctcgtcctcactgtcttccggatcgctgtccaggagcgccagctgttggggtaggtattccctctcgaaggcgggcatgacctcggcactcaggttgtcagtttctagaaacgaggaggatttgatattgacggtgccggcggagatgcctttcaagagcccctcgtccatctggtcagaaaagacgatctttttgttgtcgagcttggtggcgaaggagccgtagagggcgttggagaggagcttggcgatggagcgcatggtctggtttttttccttgtcggcgcgctccttggcggcgatgttgagctgcacgtactcgcgcgccacgcacttccattcggggaagacggtggtcagctcgtcgggcacgattctgacctgccagccccgattatgcagggtgatgaggtccacactggtggccacctcgccgcgcaggggctcattagtccagcagaggcgtccgcccttgcgcgagcagaaggggggcagggggtccagcatgacctcgtcgggggggtcggcatcgatggtgaagatgccgggcaggaggtcggggtcaaagtagctgatggaagtggccagatcgtccagggcagcttgccattcgcgcacggccagcgcgcgctcgtagggactgaggggcgtgccccagggcatgggatgggtaagcgcggaggcgtacatgccgcagatgtcgtagacgtagaggggctcctcgaggatgccgatgtaggtggggtagcagcgccccccgcggatgctggcgcgcacgtagtcatacagctcgtgcgagggggcgaggagccccgggcccaggttggtgcgactgggcttttcggcgcggtagacgatctggcggaaaatggcatgcgagttggaggagatggtgggcctttggaagatgttgaagtgggcgtggggcagtccgaccgagtcgcggatgaagtgggcgtaggagtcttgcagcttggcgacgagctcggcggtgactaggacgtccagagcgcagtagtcgagggtctcctggatgatgtcatacttgagctgtcccttttgtttccacagctcgcggttgagaaggaactcttcgcggtccttccagtactcttcgagggggaacccgtcctgatctgcacggtaagagcctagcatgtagaactggttgacggccttgtaggcgcagcagcccttctccacggggagggcgtaggcctgggcggccttgcgcagggaggtgtgcgtgagggcgaaagtgtccctgaccatgaccttgaggaactggtgcttgaagtcgatatcgtcgcagcccccctgctcccagagctggaagtccgtgcgcttcttgtaggcggggttgggcaaagcgaaagtaacatcgttgaagaggatcttgcccgcgcggggcataaagttgcgagtgatgcggaaaggttggggcacctcggcccggttgttgatgacctgggcggcgagcacgatctcgtcgaagccgttgatgttgtggcccacgatgtagagttccacgaatcgcggacggcccttgacgtggggcagtttcttgagctcctcgtaggtgagctcgtcggggtcgctgagcccgtgctgctcgagcgcccagtcggcgagatgggggttggcgcggaggaaggaagtccagagatccacggccagggcggtttgcagacggtcccggtactgacggaactgctgcccgacggccattttttcgggggtgacgcagtagaaggtgcgggggtccccgtgccagcgatcccatttgagctggagggcgagatcgagggcgagctcgacgagccggtcgtccccggagagtttcatgaccagcatgaaggggacgagctgcttgccgaaggaccccatccaggtgtaggtttccacatcgtaggtgaggaagagcctttcggtgcgaggatgcgagccgatggggaagaactggatctcctgccaccaattggaggaatggctgttgatgtgatggaagtagaaatgccgacggcgcgccgaacactcgtgcttgtgtttatacaagcggccacagtgctcgcaacgctgcacgggatgcacgtgctgcacgagctgtacctgagttcctttgacgaggaatttcagtgggaagtggagtcgtggcgcctgcatctcgtgctgtactacgtcgtggtggtcggcctggccctcttctgcctcgatggtggtcatgctgacgagcccgcgcgggaggcaggtccagacctcggcgcgagcgggtcggagagcgaggacgagggcgcgcaggccggagctgtccagggtcctgagacgctgcggagtcaggtcagtgggcagcggcggcgcgcggttgacttgcaggagtttttccagggcgcgcgggaggtccagatggtacttgatctccaccgcgccattggtggcgacgtcgatggcttgcagggtcccgtgcccctggggtgtgaccaccgtcccccgtttcttcttgggcggctggggcgacgggggcggtgcctcttccatggttagaagcggcggcgaggacgcgcgccgggcggcaggggcggctcggggcccggaggcaggggcggcaggggcacgtcggcgccgcgcgcgggtaggttctggtactgcgcccggagaagactggcgtgagcgacgacgcgacggttgacgtcctggatctgacgcctctgggtgaaggccacgggacccgtgagtttgaacctgaaagagagttcgacagaatcaatctcggtatcgttgacggcggcctgccgcaggatctcttgcacgtcgcccgagttgtcctggtaggcgatctcggtcatgaactgctcgatctcctcctcttgaaggtctccgcggccggcgcgctccacggtggccgcgaggtcgttggagatgcggcccatgagctgcgagaaggcgttcatgcccgcctcgttccagacgcggctgtagaccacgacgccctcgggatcgcgggcgcgcatgaccacctgggcgaggttgagctccacgtggcgcgtgaagaccgcgtagttgcagaggcgctggtagaggtagttgagcgtggtggcgatgtgctcggtgacgaagaaatacatgatccagcggcggagcggcatctcgctgacgtcgcccagcgcctccaaacgttccatggcctcgtaaaagtccacggcgaagttgaaaaactgggagttgcgcgccgagacggtcaactcctcctccagaagacggatgagctcggcgatggtggcgcgcacctcgcgctcgaaggcccccgggagttcctccacttcctcttcttcctcctccactaacatctcttctacttcctcctcaggcggcagtggtggcgggggagggggcctgcgtcgccggcggcgcacgggcagacggtcgatgaagcgctcgatggtctcgccgcgccggcgtcgcatggtctcggtgacggcgcgcccgtcctcgcggggccgcagcgtgaagacgccgccgcgcatctccaggtggccgggggggtccccgttgggcagggagagggcgctgacgatgcatcttatcaattgccccgtagggactccgcgcaaggacctgagcgtctcgagatccacgggatctgaaaaccgctgaacgaaggcttcgagccagtcgcagtcgcaaggtaggctgagcacggtttcttctggcgggtcatgttggttgggagcggggcgggcgatgctgctggtgatgaagttgaaataggcggttctgagacggcggatggtggcgaggagcaccaggtctttgggcccggcttgctggatgcgcagacggtcggccatgccccaggcgtggtcctgacacctggccaggtccttgtagtagtcctgcatgagccgctccacgggcacctcctcctcgcccgcgcggccgtgcatgcgcgtgagcccgaagccgcgctggggctggacgagcgccaggtcggcgacgacgcgctcggcgaggatggcttgctggatctgggtgagggtggtctggaagtcatcaaagtcgacgaagcggtggtaggctccggtgttgatggtgtaggagcagttggccatgacggaccagttgacggtctggtggcccggacgcacgagctcgtggtacttgaggcgcgagtaggcgcgcgtgtcgaagatgtagtcgttgcaggtgcgcaccaggtactggtagccgatgaggaagtgcggcggcggctggcggtagagcggccatcgctcggtggcgggggcgccgggcgcgaggtcctcgagcatggtgcggtggtagccgtagatgtacctggacatccaggtgatgccggcggcggtggtggaggcgcgcgggaactcgcggacgcggttccagatgttgcgcagcggcaggaagtagttcatggtgggcacggtctggcccgtgaggcgcgcgcagtcgtggatgctctatacgggcaaaaacgaaagcggtcagcggctcgactccgtggcctggaggctaagcgaacgggttgggctgcgcgtgtaccccggttcgaatctcgaatcaggctggagccgcagctaacgtggtattggcactcccgtctcgacccaagcctgcaccaaccctccaggatacggaggcgggtcgttttgcaacttttttttggaggccggatgagactagtaagcgcggaaagcggccgaccgcgatggctcgctgccgtagtctggagaagaatcgccagggttgcgttgcggtgtgccccggttcgaggccggccggattccgcggctaacgagggcgtggctgccccgtcgtttccaagaccccatagccagccgacttctccagttacggagcgagcccctcttttgttttgtttgtttttgccagatgcatcccgtactgcggcagatgcgcccccaccaccctccaccgcaacaacagccccctccacagccggcgcttctgcccccgccccagcagcaacttccagccacgaccgccgcggccgccgtgagcggggctggacagagttatgatcaccagctggccttggaagagggcgaggggctggcgcgcctgggggcgtcgtcgccggagcggcacccgcgcgtgcagatgaaaagggacgctcgcgaggcctacgtgcccaagcagaacctgttcagagacaggagcggcgaggagcccgaggagatgcgcgcggcccggttccacgcggggcgggagctgcggcgcggcctggaccgaaagagggtgctgagggacgaggatttcgaggcggacgagctgacggggatcagccccgcgcgcgcgcacgtggccgcggccaacctggtcacggcgtacgagcagaccgtgaaggaggagagcaacttccaaaaatccttcaacaaccacgtgcgcaccctgatcgcgcgcgaggaggtgaccctgggcctgatgcacctgtgggacctgctggaggccatcgtgcagaaccccaccagcaagccgctgacggcgcagctgttcctggtggtgcagcatagtcgggacaacgaagcgttcagggaggcgctgctgaatatcaccgagcccgagggccgctggctcctggacctggtgaacattctgcagagcatcgtggtgcaggagcgcgggctgccgctgtccgagaagctggcggccatcaacttctcggtgctgagtttgggcaagtactacgctaggaagatctacaagaccccgtacgtgcccatagacaaggaggtgaagatcgacgggttttacatgcgcatgaccctgaaagtgctgaccctgagcgacgatctgggggtgtaccgcaacgacaggatgcaccgtgcggtgagcgccagcaggcggcgcgagctgagcgaccaggagctgatgcatagtctgcagcgggccctgaccggggccgggaccgagggggagagctactttgacatgggcgcggacctgcactggcagcccagccgccgggccttggaggcggcggcaggaccctacgtagaagaggtggacgatgaggtggacgaggagggcgagtacctggaagactgatggcgcgaccgtatttttgctagatgcaacaacaacagccacctcctgatcccgcgatgcgggcggcgctgcagagccagccgtccggcattaactcctcggacgattggacccaggccatgcaacgcatcatggcgctgacgacccgcaaccccgaagcctttagacagcagccccaggccaaccggctctcggccatcctggaggccgtggtgccctcgcgctccaaccccacgcacgagaaggtcctggccatcgtgaacgcgctggtggagaacaaggccatccgcggcgacgaggccggcctggtgtacaacgcgctgctggagcgcgtggcccgctacaacagcaccaacgtgcagaccaacctggaccgcatggtgaccgacgtgcgcgaggccgtggcccagcgcgagcggttccaccgcgagtccaacctgggatccatggtggcgctgaacgccttcctcagcacccagcccgccaacgtgccccggggccaggaggactacaccaacttcatcagcgccctgcgcctgatggtgaccgaggtgccccagagcgaggtgtaccagtccgggccggactacttcttccagaccagtcgccagggcttgcagaccgtgaacctgagccaggctttcaagaacttgcagggcctgtggggcgtgcaggccccggtcggggaccgcgcgacggtgtcgagcctgctgacgccgaactcgcgcctgctgctgctgctggtggcccccttcacggacagcggcagcatcaaccgcaactcgtacctgggctacctgattaacctgtaccgcgaggccatcggccaggcgcacgtggacgagcagacctaccaggagatcacccacgtgagccgcgccctgggccaggacgacccgggcaacctggaagccaccctgaactttttgctgaccaaccggtcgcagaagatcccgccccagtacgcgctcagcaccgaggaggagcgcatcctgcgttacgtgcagcagagcgtgggcctgttcctgatgcaggagggggccacccccagcgccgcgctcgacatgaccgcgcgcaacatggagcccagcatgtacgccagcaaccgcccgttcatcaataaactgatggactacttgcatcgggcggccgccatgaactctgactatttcaccaacgccatcctgaatccccactggctcccgccgccggggttctacacgggcgagtacgacatgcccgaccccaatgacgggttcctgtgggacgatgtggacagcagcgtgttctccccccgaccgggtgctaacgagcgccccttgtggaagaaggaaggcagcgaccgacgcccgtcctcggcgctgtccggccgcgagggtgctgccgcggcggtgcccgaggccgccagtcctttcccgagcttgcccttctcgctgaacagtatccgcagcagcgagctgggcaggatcacgcgcccgcgcttgctgggcgaagaggagtacttgaatgactcgctgttgagacccgagcgggagaagaacttccccaataacgggatagaaagcctggtggacaagatgagccgctggaagacgtatgcgcaggagcacagggacgatccccgggcgtcgcagggggccacgagccggggcagcgccgcccgtaaacgccggtggcacgacaggcagcggggacagatgtgggacgatgaggactccgccgacgacagcagcgtgttggacttgggtgggagtggtaacccgttcgctcacctgcgcccccgtatcgggcgcatgatgtaagagaaaccgaaaataaatgatactcaccaaggccatggcgaccagcgtgcgttcgtttcttctctgttgttgttgtatctagtatgatgaggcgtgcgtacccggagggtcctcctccctcgtacgagagcgtgatgcagcaggcgatggcggcggcggcgatgcagcccccgctggaggctccttacgtgcccccgcggtacctggcgcctacggaggggcggaacagcattcgttactcggagctggcacccttgtacgataccacccggttgtacctggtggacaacaagtcggcggacatcgcctcgctgaactaccagaacgaccacagcaacttcctgaccaccgtggtgcagaacaatgacttcacccccacggaggccagcacccagaccatcaactttgacgagcgctcgcggtggggcggccagctgaaaaccatcatgcacaccaacatgcccaacgtgaacgagttcatgtacagcaacaagttcaaggcgcgggtgatggtctcccgcaagacccccaatggggtgacagtgacagaggattatgatggtagtcaggatgagctgaagtatgaatgggtggaatttgagctgcccgaaggcaacttctcggtgaccatgaccatcgacctgatgaacaacgccatcatcgacaattacttggcggtggggcggcagaacggggtgctggagagcgacatcggcgtgaagttcgacactaggaacttcaggctgggctgggaccccgtgaccgagctggtcatgcccggggtgtacaccaacgaggctttccatcccgatattgtcttgctgcccggctgcggggtggacttcaccgagagccgcctcagcaacctgctgggcattcgcaagaggcagcccttccaggaaggcttccagatcatgtacgaggatctggaggggggcaacatccccgcgctcctggatgtcgacgcctatgagaaaagcaaggaggatgcagcagctgaagcaactgcagccgtagctaccgcctctaccgaggtcaggggcgataattttgcaagcgccgcagcagtggcagcggccgaggcggctgaaaccgaaagtaagatagtcattcagccggtggagaaggatagcaagaacaggagctacaacgtactaccggacaagataaacaccgcctaccgcagctggtacctagcctacaactatggcgaccccgagaagggcgtgcgctcctggacgctgctcaccacctcggacgtcacctgcggcgtggagcaagtctactggtcgctgcccgacatgatgcaagacccggtcaccttccgctccacgcgtcaagttagcaactacccggtggtgggcgccgagctcctgcccgtctactccaagagcttcttcaacgagcaggccgtctactcgcagcagctgcgcgccttcacctcgcttacgcacgtcttcaaccgcttccccgagaaccagatcctcgtccgcccgcccgcgcccaccattaccaccgtcagtgaaaacgttcctgctctcacagatcacgggaccctgccgctgcgcagcagtatccggggagtccagcgcgtgaccgttactgacgccagacgccgcacctgcccctacgtctacaaggccctgggcatagtcgcgccgcgcgtcctctcgagccgcaccttctaaatgtccattctcatctcgcccagtaataacaccggttggggcctgcgcgcgcccagcaagatgtacggaggcgctcgccaacgctccacgcaacaccccgtgcgcgtgcgcgggcacttccgcgctccctggggcgccctcaagggccgcgtgcggtcgcgcaccaccgtcgacgacgtgatcgaccaggtggtggccgacgcgcgcaactacacccccgccgccgcgcccgtctccaccgtggacgccgtcatcgacagcgtggtggccgacgcgcgccggtacgcccgcgccaagagccggcggcggcgcatcgcccggcggcaccggagcacccccgccatgcgcgcggcgcgagccttgctgcgcagggccaggcgcacgggacgcagggccatgctcagggcggccagacgcgcggcttcaggcgccagcgccggcaggacccggagacgcgcggccacggcggcggcagcggccatcgccagcatgtcccgcccgcggcgagggaacgtgtactgggtgcgcgacgccgccaccggtgtgcgcgtgcccgtgcgcacccgcccccctcgcacttgaagatgttcacttcgcgatgttgatgtgtcccagcggcgaggaggatgtccaagcgcaaattcaaggaagagatgctccaggtcatcgcgcctgagatctacggccctgcggtggtgaaggaggaaagaaagccccgcaaaatcaagcgggtcaaaaaggacaaaaaggaagaagaaagtgatgtggacggattggtggagtttgtgcgcgagttcgccccccggcggcgcgtgcagtggcgcgggcggaaggtgcaaccggtgctgagacccggcaccaccgtggtcttcacgcccggcgagcgctccggcaccgcttccaagcgctcctacgacgaggtgtacggggatgatgatattctggagcaggcggccgagcgcctgggcgagtttgcttacggcaagcgcagccgttccgcaccgaaggaagaggcggtgtccatcccgctggaccacggcaaccccacgccgagcctcaagcccgtgaccttgcagcaggtgctgccgaccgcggcgccgcgccgggggttcaagcgcgagggcgaggatctgtaccccaccatgcagctgatggtgcccaagcgccagaagctggaagacgtgctggagaccatgaaggtggacccggacgtgcagcccgaggtcaaggtgcggcccatcaagcaggtggccccgggcctgggcgtgcagaccgtggacatcaagattcccacggagcccatggaaacgcagaccgagcccatgatcaagcccagcaccagcaccatggaggtgcagacggatccctggatgccatcggctcctagtcgaagaccccggcgcaagtacggcgcggccagcctgctgatgcccaactacgcgctgcatccttccatcatccccacgccgggctaccgcggcacgcgcttctaccgcggtcataccagcagccgccgccgcaagaccaccactcgccgccgccgtcgccgcaccgccgctgcaaccacccctgccgccctggtgcggagagtgtaccgccgcggccgcgcacctctgaccctgccgcgcgcgcgctaccacccgagcatcgccatttaaactttcgcctgctttgcagatcaatggccctcacatgccgccttcgcgttcccattacgggctaccgaggaagaaaaccgcgccgtagaaggctggcggggaacgggatgcgtcgccaccaccaccggcggcggcgcgccatcagcaagcggttggggggaggcttcctgcccgcgctgatccccatcatcgccgcggcgatcggggcgatccccggcattgcttccgtggcggtgcaggcctctcagcgccactgagacacacttggaaacatcttgtaataaaccaatggactctgacgctcctggtcctgtgatgtgttttcgtagacagatggaagacatcaatttttcgtccctggctccgcgacacggcacgcggccgttcatgggcacctggagcgacatcggcaccagccaactgaacgggggcgccttcaattggagcagtctctggagcgggcttaagaatttcgggtccacgcttaaaacctatggcagcaaggcgtggaacagcaccacagggcaggcgctgagggataagctgaaagagcagaacttccagcagaaggtggtcgatgggctcgcctcgggcatcaacggggtggtggacctggccaaccaggccgtgcagcggcagatcaacagccgcctggacccggtgccgcccgccggctccgtggagatgccgcaggtggaggaggagctgcctcccctggacaagcggggcgagaagcgaccccgccccgatgcggaggagacgctgctgacgcacacggacgagccgcccccgtacgaggaggcggtgaaactgggtctgcccaccacgcggcccatcgcgcccctggccaccggggtgctgaaacccgaaaagcccgcgaccctggacttgcctcctccccagccttcccgcccctctacagtggctaagcccctgccgccggtggccgtggcccgcgcgcgacccgggggcaccgcccgccctcatgcgaactggcagagcactctgaacagcatcgtgggtctgggagtgcagagtgtgaagcgccgccgctgctattaaacctaccgtagcgcttaacttgcttgtctgtgtgtgtatgtattatgtcgccgccgccgctgtccaccagaaggaggagtgaagaggcgcgtcgccgagttgcaagatggccaccccatcgatgctgccccagtgggcgtacatgcacatcgccggacaggacgcttcggagtacctgagtccgggtctggtgcagtttgcccgcgccacagacacctacttcagtctggggaacaagtttaggaaccccacggtggcgcccacgcacgatgtgaccaccgaccgcagccagcggctgacgctgcgcttcgtgcccgtggaccgcgaggacaacacctactcgtacaaagtgcgctacacgctggccgtgggcgacaaccgcgtgctggacatggccagcacctactttgacatccgcggcgtgctggatcggggccctagcttcaaaccctactccggcaccgcctacaacagtctggcccccaagggagcacccaacacttgtcagtggacatataaagccgatggtgaaactgccacagaaaaaacctatacatatggaaatgcacccgtgcagggcattaacatcacaaaagatggtattcaacttggaactgacaccgatgatcagccaatctacgcagataaaacctatcagcctgaacctcaagtgggtgatgctgaatggcatgacatcactggtactgatgaaaagtatggaggcagagctcttaagcctgataccaaaatgaagccttgttatggttcttttgccaagcctactaataaagaaggaggtcaggcaaatgtgaaaacaggaacaggcactactaaagaatatgacatagacatggctttctttgacaacagaagtgcggctgctgctggcctagctccagaaattgttttgtatactgaaaatgtggatttggaaactccagatacccatattgtatacaaagcaggcacagatgacagcagctcttctattaatttgggtcagcaagccatgcccaacagacctaactacattggtttcagagacaactttatcgggctcatgtactacaacagcactggcaatatgggggtgctggccggtcaggcttctcagctgaatgctgtggttgacttgcaagacagaaacaccgagctgtcctaccagctcttgcttgactctctgggtgacagaacccggtatttcagtatgtggaatcaggcggtggacagctatgatcctgatgtgcgcattattgaaaatcatggtgtggaggatgaacttcccaactattgtttccctctggatgctgttggcagaacagatacttatcagggaattaaggctaatggaactgatcaaaccacatggaccaaagatgacagtgtcaatgatgctaatgagataggcaagggtaatccattcgccatggaaatcaacatccaagccaacctgtggaggaacttcctctacgccaacgtggccctgtacctgcccgactcttacaagtacacgccggccaatgttaccctgcccaccaacaccaacacctacgattacatgaacggccgggtggtggcgccctcgctggtggactcctacatcaacatcggggcgcgctggtcgctggatcccatggacaacgtgaaccccttcaaccaccaccgcaatgcggggctgcgctaccgctccatgctcctgggcaacgggcgctacgtgcccttccacatccaggtgccccagaaatttttcgccatcaagagcctcctgctcctgcccgggtcctacacctacgagtggaacttccgcaaggacgtcaacatgatcctgcagagctccctcggcaacgacctgcgcacggacggggcctccatctccttcaccagcatcaacctctacgccaccttcttccccatggcgcacaacacggcctccacgctcgaggccatgctgcgcaacgacaccaacgaccagtccttcaacgactacctctcggcggccaacatgctctaccccatcccggccaacgccaccaacgtgcccatctccatcccctcgcgcaactgggccgccttccgcggctggtccttcacgcgtctcaagaccaaggagacgccctcgctgggctccgggttcgacccctacttcgtctactcgggctccatcccctacctcgacggcaccttctacctcaaccacaccttcaagaaggtctccatcaccttcgactcctccgtcagctggcccggcaacgaccggctcctgacgcccaacgagttcgaaatcaagcgcaccgtcgacggcgagggctacaacgtggcccagtgcaacatgaccaaggactggttcctggtccagatgctggcccactacaacatcggctaccagggcttctacgtgcccgagggctacaaggaccgcatgtactccttcttccgcaacttccagcccatgagccgccaggtggtggacgaggtcaactacaaggactaccaggccgtcaccctggcctaccagcacaacaactcgggcttcgtcggctacctcgcgcccaccatgcgccagggccagccctaccccgccaactacccctacccgctcatcggcaagagcgccgtcaccagcgtcacccagaaaaagttcctctgcgacagggtcatgtggcgcatccccttctccagcaacttcatgtccatgggcgcgctcaccgacctcggccagaacatgctctatgccaactccgcccacgcgctagacatgaatttcgaagtcgaccccatggatgagtccacccttctctatgttgtcttcgaagtcttcgacgtcgtccgagtgcaccagccccaccgcggcgtcatcgaggccgtctacctgcgcacccccttctcggccggtaacgccaccacctaagctcttgcttcttgcaagccatggccgcgggctccggcgagcaggagctcagggccatcatccgcgacctgggctgcgggccctacttcctgggcaccttcgataagcgcttcccgggattcatggccccgcacaagctggcctgcgccatcgtcaacacggccggccgcgagaccgggggcgagcactggctggccttcgcctggaacccgcgctcgaacacctgctacctcttcgaccccttcgggttctcggacgagcgcctcaagcagatctaccagttcgagtacgagggcctgctgcgccgcagcgccctggccaccgaggaccgctgcgtcaccctggaaaagtccacccagaccgtgcagggtccgcgctcggccgcctgcgggctcttctgctgcatgttcctgcacgccttcgtgcactggcccgaccgccccatggacaagaaccccaccatgaacttgctgacgggggtgcccaacggcatgctccagtcgccccaggtggaacccaccctgcgccgcaaccaggaggcgctctaccgcttcctcaactcccactccgcctactttcgctcccaccgcgcgcgcatcgagaaggccaccgccttcgaccgcatgaatcaagacatgtaaaccgtgtgtgtatgttaaatgtctttaataaacagcactttcatgttacacatgcatctgagatgatttatttagaaatcgaaagggttctgccgggtctcggcatggcccgcgggcagggacacgttgcggaactggtacttggccagccacttgaactcggggatcagcagtttgggcagcggggtgtcggggaaggagtcggtccacagcttccgcgtcagttgcagggcgcccagcaggtcgggcgcggagatcttgaaatcgcagttgggacccgcgttctgcgcgcgggagttgcggtacacggggttgcagcactggaacaccatcagggccgggtgcttcacgctcgccagcaccgtcgcgtcggtgatgctctccacgtcgaggtcctcggcgttggccatcccgaagggggtcatcttgcaggtctgccttcccatggtgggcacgcacccgggcttgtggttgcaatcgcagtgcagggggatcagcatcatctgggcctggtcggcgttcatccccgggtacatggccttcatgaaagcctccaattgcctgaacgcctgctgggccttggctccctcggtgaagaagaccccgcaggacttgctagagaactggttggtggcgcacccggcgtcgtgcacgcagcagcgcgcgtcgttgttggccagctgcaccacgctgcgcccccagcggttctgggtgatcttggcccggtcggggttctccttcagcgcgcgctgcccgttctcgctcgccacatccatctcgatcatgtgctccttctggatcatggtggtcccgtgcaggcaccgcagcttgccctcggcctcggtgcacccgtgcagccacagcgcgcacccggtgcactcccagttcttgtgggcgatctgggaatgcgcgtgcacgaagccctgcaggaagcggcccatcatggtggtcagggtcttgttgctagtgaaggtcagcggaatgccgcggtgctcctcgttgatgtacaggtggcagatgcggcggtacacctcgccctgctcgggcatcagctggaagttggctttcaggtcggtctccacgcggtagcggtccatcagcatagtcatgatttccatacccttctcccaggccgagacgatgggcaggctcatagggttcttcaccatcatcttagcgctagcagccgcggccagggggtcgctctcgtccagggtctcaaagctccgcttgccgtccttctcggtgatccgcaccggggggtagctgaagcccacggccgccagctcctcctcggcctgtctttcgtcctcgctgtcctggctgacgtcctgcaggaccacatgcttggtcttgcggggtttcttcttgggcggcagcggcggcggagatgttggagatggcgagggggagcgcgagttctcgctcaccactactatctcttcctcttcttggtccgaggccacgcggcggtaggtatgtctcttcgggggcagaggcggaggcgacgggctctcgccgccgcgacttggcggatggctggcagagccccttccgcgttcgggggtgcgctcccggcggcgctctgactgacttcctccgcggccggccattgtgttctcctagggaggaacaacaagcatggagactcagccatcgccaacctcgccatctgcccccaccgccgacgagaagcagcagcagcagaatgaaagcttaaccgccccgccgcccagccccgccacctccgacgcggccgtcccagacatgcaagagatggaggaatccatcgagattgacctgggctatgtgacgcccgcggagcacgaggaggagctggcagtgcgcttttcacaagaagagatacaccaagaacagccagagcaggaagcagagaatgagcagagtcaggctgggctcgagcatgacggcgactacctccacctgagcgggggggaggacgcgctcatcaagcatctggcccggcaggccaccatcgtcaaggatgcgctgctcgaccgcaccgaggtgcccctcagcgtggaggagctcagccgcgcctacgagttgaacctcttctcgccgcgcgtgccccccaagcgccagcccaatggcacctgcgagcccaacccgcgcctcaacttctacccggtcttcgcggtgcccgaggccctggccacctaccacatctttttcaagaaccaaaagatccccgtctcctgccgcgccaaccgcacccgcgccgacgcccttttcaacctgggtcccggcgcccgcctacctgatatcgcctccttggaagaggttcccaagatcttcgagggtctgggcagcgacgagactcgggccgcgaacgctctgcaaggagaaggaggagagcatgagcaccacagcgccctggtcgagttggaaggcgacaacgcgcggctggcggtgctcaaacgcacggtcgagctgacccatttcgcctacccggctctgaacctgccccccaaagtcatgagcgcggtcatggaccaggtgctcatcaagcgcgcgtcgcccatctccgaggacgagggcatgcaagactccgaggagggcaagcccgtggtcagcgacgagcagctggcccggtggctgggtcctaatgctagtccccagagtttggaagagcggcgcaaactcatgatggccgtggtcctggtgaccgtggagctggagtgcctgcgccgcttcttcgccgacgcggagaccctgcgcaaggtcgaggagaacctgcactacctcttcaggcacgggttcgtgcgccaggcctgcaagatctccaacgtggagctgaccaacctggtctcctacatgggcatcttgcacgagaaccgcctggggcagaacgtgctgcacaccaccctgcgcggggaggcccggcgcgactacatccgcgactgcgtctacctctacctctgccacacctggcagacgggcatgggcgtgtggcagcagtgtctggaggagcagaacctgaaagagctctgcaagctcctgcagaagaacctcaagggtctgtggaccgggttcgacgagcgcaccaccgcctcggacctggccgacctcattttccccgagcgcctcaggctgacgctgcgcaacggcctgcccgactttatgagccaaagcatgttgcaaaactttcgctctttcatcctcgaacgctccggaatcctgcccgccacctgctccgcgctgccctcggacttcgtgccgctgaccttccgcgagtgccccccgccgctgtggagccactgctacctgctgcgcctggccaactacctggcctaccactcggacgtgatcgaggacgtcagcggcgagggcctgctcgagtgccactgccgctgcaacctctgcacgccgcaccgctccctggcctgcaacccccagctgctgagcgagacccagatcatcggcaccttcgagttgcaagggcccagcgaaggcgagggttcagccgccaaggggggtctgaaactcaccccggggctgtggacctcggcctacttgcgcaagttcgtgcccgaggactaccatcccttcgagatcaggttctacgaggaccaatcccatccgcccaaggccgagctgtcggcctgcgtcatcacccagggggcgatcctggcccaattgcaagccatccagaaatcccgccaagaattcttgctgaaaaagggccgcggggtctacctcgacccccagaccggtgaggagctcaaccccggcttcccccaggatgccccgaggaaacaagaagctgaaagtggagctgccgcccgtggaggatttggaggaagactgggagaacagcagtcaggcagaggaggaggagatggaggaagactgggacagcactcaggcagaggaggacagcctgcaagacagtctggaggaagacgaggaggaggcagaggaggaggtggaagaagcagccgccgccagaccgtcgtcctcggcgggggagaaagcaagcagcacggataccatctccgctccgggtcggggtcccgctcgaccacacagtagatgggacgagaccggacgattcccgaaccccaccacccagaccggtaagaaggagcggcagggatacaagtcctggcgggggcacaaaaacgccatcgtctcctgcttgcaggcctgcgggggcaacatctccttcacccggcgctacctgctcttccaccgcggggtgaactttccccgcaacatcttgcattactaccgtcacctccacagcccctactacttccaagaagaggcagcagcagcagaaaaagaccagcagaaaaccagcagctagaaaatccacagcggcggcagcaggtggactgaggatcgcggcgaacgagccggcgcaaacccgggagctgaggaaccggatctttcccaccctctatgccatcttccagcagagtcgggggcaggagcaggaactgaaagtcaagaaccgttctctgcgctcgctcacccgcagttgtctgtatcacaagagcgaagaccaacttcagcgcactctcgaggacgccgaggctctcttcaacaagtactgcgcgctcactcttaaagagtagcccgcgcccgcccagtcgcagaaaaaggcgggaattacgtcacctgtgcccttcgccctagccgcctccacccatcatcatgagcaaagagattcccacgccttacatgtggagctaccagccccagatgggcctggccgccggtgccgcccaggactactccacccgcatgaattggctcagcgccgggcccgcgatgatctcacgggtgaatgacatccgcgcccaccgaaaccagatactcctagaacagtcagcgctcaccgccacgccccgcaatcacctcaatccgcgtaattggcccgccgccctggtgtaccaggaaattccccagcccacgaccgtactacttccgcgagacgcccaggccgaagtccagctgactaactcaggtgtccagctggcgggcggcgccaccctgtgtcgtcaccgccccgctcagggtataaagcggctggtgatccggggcagaggcacacagctcaacgacgaggtggtgagctcttcgctgggtctgcgacctgacggagtcttccaactcgccggatcggggagatcttccttcacgcctcgtcaggccgtcctgactttggagagttcgtcctcgcagccccgctcgggtggcatcggcactctccagttcgtggaggagttcactccctcggtctacttcaaccccttctccggctcccccggccactacccggacgagttcatcccgaacttcgacgccatcagcgagtcggtggacggctacgattgaatgtcccatggtggcgcagctgacctagctcggcttcgacacctggaccactgccgccgcttccgctgcttcgctcgggatctcgccgagtttgcctactttgagctgcccgaggagcaccctcagggcccggcccacggagtgcggatcgtcgtcgaagggggcctcgactcccacctgcttcggatcttcagccagcgtccgatcctggtcgagcgcgagcaaggacagacccttctgactctgtactgcatctgcaaccaccccggcctgcatgaaagtctttgttgtctgctgtgtactgagtataataaaagctgagatcagcgactactccggacttccgtgtgtttaaactcacccccttatccagtgaaataaagatcatattgatgatgattttacagaaataaaaaataatcatttgatttgaaataaagatacaatcatattgatgatttgagtttaacaaaaaaataaagaatcacttacttgaaatctgataccaggtctctgtccatgttttctgccaacaccacttcactcccctcttcccagctctggtactgcaggccccggcgggctgcaaacttcctccacacgctgaaggggatgtcaaattcctcctgtccctcaatcttcattttatcttctatcagatgtccaaaaagcgcgtccgggtggatgatgacttcgaccccgtctacccctacgatgcagacaacgcaccgaccgtgcccttcatcaacccccccttcgtctcttcagatggattccaagagaagcccctgggggtgttgtccctgcgactggccgaccccgtcaccaccaagaacggggaaatcaccctcaagctgggagagggggtggacctcgattcctcgggaaaactcatctccaacacggccaccaaggccgccgcccctctcagtttttccaacaacaccatttcccttaacatggatcaccccttttacactaaagatggaaaattatccttacaagtttctccaccattaaatatactgagaacaagcattctaaacacactagctttaggttttggatcaggtttaggactccgtggctctgccttggcagtacagttagtctctccacttacatttgatactgatggaaacataaagcttaccttagacagaggtttgcatgttacaacaggagatgcaattgaaagcaacataagctgggctaaaggtttaaaatttgaagatggagccatagcaaccaacattggaaatgggttagagtttggaagcagtagtacagaaacaggtgttgatgatgcttacccaatccaagttaaacttggatctggccttagctttgacagtacaggagccataatggctggtaacaaagaagacgataaactcactttgtggacaacacctgatccatcaccaaactgtcaaatactcgcagaaaatgatgcaaaactaacactttgcttgactaaatgtggtagtcaaatactggccactgtgtcagtcttagttgtaggaagtggaaacctaaaccccattactggcaccgtaagcagtgctcaggtgtttctacgttttgatgcaaacggtgttcttttaacagaacattctacactaaaaaaatactgggggtataggcagggagatagcatagatggcactccatataccaatgctgtaggattcatgcccaatttaaaagcttatccaaagtcacaaagttctactactaaaaataatatagtagggcaagtatacatgaatggagatgtttcaaaacctatgcttctcactataaccctcaatggtactgatgacagcaacagtacatattcaatgtcattttcatacacctggactaatggaagctatgttggagcaacatttggggctaactcttataccttctcatacatcgcccaagaatgaacactgtatcccaccctgcatgccaacccttcccaccccactctgtggaacaaactctgaaacacaaaataaaataaagttcaagtgttttattgattcaacagttttacaggattcgagcagttatttttcctccaccctcccaggacatggaatacaccaccctctccccccgcacagccttgaacatctgaatgccattggtgatggacatgcttttggtctccacgttccacacagtttcagagcgagccagtctcgggtcggtcagggagatgaaaccctccgggcactcccgcatctgcacctcacagctcaacagctgaggattgtcctcggtggtcgggatcacggttatctggaagaagcagaagagcggcggtgggaatcatagtccgcgaacgggatcggccggtggtgtcgcatcaggccccgcagcagtcgctgccgccgccgctccgtcaagctgctgctcagggggtccgggtccagggactccctcagcatgatgcccacggccctcagcatcagtcgtctggtgcggcgggcgcagcagcgcatgcggatctcgctcaggtcgctgcagtacgtgcaacacagaaccaccaggttgttcaacagtccatagttcaacacgctccagccgaaactcatcgcgggaaggatgctacccacgtggccgtcgtaccagatcctcaggtaaatcaagtggtgccccctccagaacacgctgcccacgtacatgatctccttgggcatgtggcggttcaccacctcccggtaccacatcaccctctggttgaacatgcagccccggatgatcctgcggaaccacagggccagcaccgccccgcccgccatgcagcgaagagaccccgggtcccggcaatggcaatggaggacccaccgctcgtacccgtggatcatctgggagctgaacaagtctatgttggcacagcacaggcatatgctcatgcatctcttcagcactctcaactcctcgggggtcaaaaccatatcccagggcacggggaactcttgcaggacagcgaaccccgcagaacagggcaatcctcgcacagaacttacattgtgcatggacagggtatcgcaatcaggcagcaccgggtgatcctccaccagagaagcgcgggtctcggtctcctcacagcgtggtaagggggccggccgatacgggtgatggcgggacgcggctgatcgtgttcgcgaccgtgtcatgatgcagttgctttcggacattttcgtacttgctgtagcagaacctggtccgggcgctgcacaccgatcgccggcggcggtctcggcgcttggaacgctcggtgttgaaattgtaaaacagccactctctcagaccgtgcagcagatctagggcctcaggagtgatgaagatcccatcatgcctgatggctctgatcacatcgaccaccgtggaatgggccagacccagccagatgatgcaattttgttgggtttcggtgacggcgggggagggaagaacaggaagaaccatgattaacttttaatccaaacggtctcggagtacttcaaaatgaagatcgcggagatggcacctctcgcccccgctgtgttggtggaaaataacagccaggtcaaaggtgatacggttctcgagatgttccacggtggcttccagcaaagcctccacgcgcacatccagaaacaagacaatagcgaaagcgggagggttctctaattcctcaatcatcatgttacactcctgcaccatccccagataattttcatttttccagccttgaatgattcgaactagttcctgaggtaaatccaagccagccatgataaagagctcgcgcagagcgccctccaccggcattcttaagcacaccctcataattccaagatattctgctcctggttcacctgcagcagattgacaagcggaatatcaaaatctctgccgcgatccctgagctcctccctcagcaataactgtaagtactctttcatatcctctccgaaatttttagccataggaccaccaggaataagattagggcaagccacagtacagataaaccgaagtcctccccagtgagcattgccaaatgcaagactgctataagcatgctggctagacccggtgatatcttccagataactggacagaaaatcgcccaggcaatttttaagaaaatcaacaaaagaaaaatcctccaggtggacgtttagagcctcgggaacaacgatgaagtaaatgcaagcggtgcgttccagcatggttagttagctgatctgtagaaaaaacaaaaatgaacattaaaccatgctagcctggcgaacaggtgggtaaatcgttctctccagcaccaggcaggccacggggtctccggcgcgaccctcgtaaaaattgtcgctatgattgaaaaccatcacagagagacgttcccggtggccggcgtgaatgattcgacaagatgaatacacccccggaacattggcgtccgcgagtgaaaaaaagcgcccgaggaagcaataaggcactacaatgctcagtctcaagtccagcaaagcgatgccatgcggatgaagcacaaaattctcaggtgcgtacaaaatgtaattactcccctcctgcacaggcagcaaagcccccgatccctccaggtacacatacaaagcctcagcgtccatagcttaccgagcagcagcacacaacaggcgcaagagtcagagaaaggctgagctctaacctgtccacccgctctctgctcaatatatagcccagatctacactgacgtaaaggccaaagtctaaaaatacccgccaaataatcacacacgcccagcacacgcccagaaaccggtgacacactcaaaaaaatacgcgcacttcctcaaacgcccaaaactgccgtcatttccgggttcccacgctacgtcatcaaaacacgactttcaaattccgtcgaccgttaaaaacgtcacccgccccgcccctaacggtcgcccgtctctcagccaatcagcgccccgcatccccaaattcaaacacctcatttgcatattaacgcgcacaaaaagtttgaggtatattattgatgatgg

SEQ ID NO: 67 - DNA, 9576 bp, Artificial Sequence
  Synthetic Construct
ggcgtaatgctctgccagtgttacaaccaattaaccaattctgattagaaaaactcatcgagcatcaaatgaaactgcaatttattcatatcaggattatcaataccatatttttgaaaaagccgtttctgtaatgaaggagaaaactcaccgaggcagttccataggatggcaagatcctggtatcggtctgcgattccgactcgtccaacatcaatacaacctattaatttcccctcgtcaaaaataaggttatcaagtgagaaatcaccatgagtgacgactgaatccggtgagaatggcaaaagcttatgcatttctttccagacttgttcaacaggccagccattacgctcgtcatcaaaatcactcgcatcaaccaaaccgttattcattcgtgattgcgcctgagcgagacgaaatacgcgatcgctgttaaaaggacaattacaaacaggaatcaaatgcaaccggcgcaggaacactgccagcgcatcaacaatattttcacctgaatcaggatattcttctaatacctggaatgctgttttcccggggatcgcagtggtgagtaaccatgcatcatcaggagtacggataaaatgcttgatggtcggaagaggcataaattccgtcagccagtttagtctgaccatctcatctgtaacatcattggcaacgctacctttgccatgtttcagaaacaactctggcgcatcgggcttcccatacaatcgatagattgtcgcacctgattgcccgacattatcgcgagcccatttatacccatataaatcagcatccatgttggaatttaatcgcggcctcgagcaagacgtttcccgttgaatatggctcataacaccccttgtattactgtttatgtaagcagacaggtcgacaatattggctattggccattgcatacgttgtatctatatcataatatgtacatttatattggctcatgtccaatatgaccgccatgttgacattgattattgactagttattaatagtaatcaattacggggtcattagttcatagcccatatatggagttccgcgttacataacttacggtaaatggcccgcctggctgaccgcccaacgacccccgcccattgacgtcaataatgacgtatgttcccatagtaacgccaatagggactttccattgacgtcaatgggtggagtatttacggtaaactgcccacttggcagtacatcaagtgtatcatatgccaagtccgccccctattgacgtcaatgacggtaaatggcccgcctggcattatgcccagtacatgaccttacgggactttcctacttggcagtacatctacgtattagtcatcgctattaccatggtgatgcggttttggcagtacaccaatgggcgtggatagcggtttgactcacggggatttccaagtctccaccccattgacgtcaatgggagtttgttttggcaccaaaatcaacgggactttccaaaatgtcgtaataaccccgccccgttgacgcaaatgggcggtaggcgtgtacggtgggaggtctatataagcagagctcgtttagtgaaccgtcagatcgcctggagacgccatccacgctgttttgacctccatagaagacaccgggaccgatccagcctccgcggccgggaacggtgcattggaacgcggattccccgtgccaagagtgactcaccgtccggatctcagcaagcaggtatgtactctccagggtgggcctggcttccccagtcaagactccagggatttgagggacgctgtgggctcttctcttacatgtaccttttgcttgcctcaaccctgactatcttccaggtcaggatcccagagtcaggggtctgtattttcctgctggtggctccagttcaggaacagtaaaccctgctccgaatattgcctctcacatctcgtcaatctccgcgaggactggggaccctgtgacgaacatggctagcaagctgaccattgagagcactcccttcaacgtggctgaggggaaggaggtgctgctcctggtgcacaatctgccccagcacctgttcgggtactcctggtacaagggagaacgcgtggacgggaaccggcagatcataggctacgtcatcggaacccagcaggccacacccggtccagcgtacagcggccgggagattatctacccgaacgcctccctgctgatccaaaacatcatccagaacgacaccggtttctacactctgcacgtgattaagtcagatctggtcaacgaagaggccaccggccaattcagggtgtaccccgaactccctaagccgttcatcacctcgaacaacagcaacccggtcgaggatgaagatgcggtggccttgacgtgcgaacctgagatccagaacaccacctacttgtggtgggtgaacaatcagagcctgccagtctccccacgactccagctgtcgaacgacaacaggaccctgactttgctgtccgtgactcggaacgacgtgggcccttatgaatgcggtatccagaacaagctgtccgtggaccacagcgaccctgtgatcctgaacgtcctttacgggccggacgaccccaccatttccccgtcgtacacttactaccggccgggcgtgaacctgtccctgtcgtgccacgctgcctccaatccgccggcccagtactcctggctcatcgacggaaacatccagcagcacacccaagaactgttcatctccaacattaccgagaaaaactcgggactttacacctgtcaagccaacaattccgccagcggccactcccgcaccactgtcaaaactatcactgtgtccgccgaactcccgaagcccagcatcagctccaacaactcgaagcccgtggaggataaggacgctgtcgcgttcacctgtgaaccagaggcacagaataccacctacctttggtgggtcaacggacagtccctgcctgtctcaccgagactgcagctgtcaaacgggaataggactctgaccttgtttaacgtcacccggaacgacgcccgggcctacgtgtgcggcatccagaactccgtgagcgcaaaccggtctgacccagtgaccctggatgtgctgtacggccccgacactccgatcatttcaccccccgattcatcctacctgtccggcgctaacctcaacctctcatgccactccgcatccaaccccagcccgcaatattcgtggcgcattaacggaattcctcagcaacatacccaggtcctgttcattgcgaagatcacccctaacaacaacggaacctacgcctgctttgtgtcaaacctggccactggtagaaacaactccatcgtgaagtccattaccgtgtcggcgtccggatccggcgagggcagaggcagcctgctgacatgtggcgacgtggaagagaaccctggccccggagctgccccggagccggagaggacccccgttggccagggatcgtgggcccatccgggacgcaccaggggaccatccgacaggggattctgtgtggtgtcaccggccaggccagcagaagaggcaaccagcctcgagggagcgttgtctggaaccagacattcccacccgtcggtgggccggcagcaccacgcgggaccaccgtccacttccagaccgccacggccatgggacaccccttgcccgcctgtgtatgccgagactaaacacttcctgtactcatccggagacaaggaacagcttcggccgtccttcctcctgtcgtcgctcagaccgagcctgaccggagcacgcagattggtggaaactatcttccttgggtcacgtccgtggatgccaggtaccccacggcgcctcccgcgcctcccacagagatactggcagatgcggcctctgttcctggaattgctgggaaaccacgctcagtgcccgtacggagtcctgctcaagactcactgccctctgagggcggcggtcactccggcggccggagtgtgcgcacgggagaagccccagggaagcgtggcagctccggaagaggaggacaccgatccgcgccgcctcgtgcaacttctgcgccagcactcctcgccctggcaagtctacgggttcgtccgcgcctgcctgcgccgcctggtgccgcctgggctctggggttcccggcataacgagcgccgcttcctgagaaatactaagaagtttatctcacttggaaaacatgccaagttgtcgctgcaagaactcacgtggaagatgtcagtccgcgattgcgcctggctgcgccgctcgccgggcgtcgggtgtgttccagctgcagaacaccgcctgagagaagaaattctggccaaatttctgcattggctgatgtcagtgtacgtggtcgagctgctgcgctcctttttctacgtcactgagactacctttcaaaagaaccgcctgttcttctaccgcaaatctgtgtggagcaagctgcagtcaatcggcattcgccagcatctgaagagggtgcagctgcgggaactttccgaggcagaagtccgccagcaccgggaggcccggccggcgcttctcacgtcgcgtctgagattcatcccaaagcccgacgggctgaggcctatcgtcaacatggattacgtcgtgggcgctcgcacctttcgccgtgaaaagcgggccgaacgcttgacctcacgggtgaaggccctcttctccgtgctgaactacgagagagcaagacggcctggcctgctgggagcttcggtgctgggactggacgatatccaccgggcttggcggacctttgttctccgggtgagagcccaagaccctccgccggaactgtacttcgtgaaggtggcgatcaccggagcctatgatactattccgcaagatcgactcaccgaagtcatcgcctcgatcatcaaaccgcagaacacttactgcgtcaggcggtacgccgtggtccagaaggccgcgcatggccacgtgagaaaggcgttcaagtcgcacgtgtccactctcaccgacctccagccttacatgaggcaattcgttgcgcatttgcaagagacttcgcccctgagagatgcggtggtcatcgagcagagctccagcctgaacgaagcgagcagcggtctgtttgacgtgttcctccgcttcatgtgtcatcacgcggtgcgaatcaggggaaaatcatacgtgcagtgccagggaatcccacaaggcagcattctgtcgactctcttgtgttccctttgctacggcgatatggaaaacaagctgttcgctgggatcagacgggacgggttgctgctcagactggtggacgacttcctgctggtgactccgcacctcactcacgccaaaacctttctccgcactctggtgaggggagtgccagaatacggctgtgtggtcaatctccggaaaactgtggtgaatttccctgtcgaggatgaggcactcggaggaaccgcatttgtccaaatgccagcacatggcctgttcccatggtgcggtctgctgctggacacccgaactcttgaagtgcagtccgactactccagctatgcccggacgagcatccgcgccagcctcactttcaatcgcggctttaaggccggacgaaacatgcgcagaaagcttttcggagtcctccggcttaaatgccattcgctctttctcgatctccaagtcaattcgctgcagaccgtgtgcacgaacatctacaagatcctgctgctccaagcctaccggttccacgcttgcgtgcttcagctgccgtttcaccaacaggtgtggaagaacccgaccttctttctgcgggtcattagcgatactgcctccctgtgttactcaatcctcaaggcaaagaacgccggaatgtcgctgggtgcgaaaggagccgcgggacctcttcctagcgaagcggtgcagtggctctgccaccaggctttcctcctgaagctgaccaggcacagagtgacctacgtcccgctgctgggctcgctgcgcactgcacagacccagctgtctagaaaactccccggcaccaccctgaccgctctggaagccgccgccaacccagcattgccgtcagatttcaagaccatcttggacggatccggcacaatcctgtctgagggcgccaccaacttcagcctgctgaaactggccggcgacgtggaactgaaccctggccctacccctggaacccagagccccttcttccttctgctgctgctgaccgtgctgactgtcgtgacaggctctggccacgccagctctacacctggcggcgagaaagagacaagcgccacccagagaagcagcgtgccaagcagcaccgagaagaacgccgtgtccatgaccagctccgtgctgagcagccactctcctggcagcggcagcagcacaacacagggccaggatgtgacactggcccctgccacagaacctgcctctggatctgccgccacctggggacaggacgtgacaagcgtgccagtgaccagacctgccctgggctctacaacaccccctgcccacgatgtgaccagcgcccctgataacaagcctgcccctggaagcacagcccctccagctcatggcgtgacctctgccccagataccagaccagccccaggatctacagccccacccgcacacggcgtgacaagtgcccctgacacaagacccgctccaggctctactgctcctcctgcccatggcgtgacaagcgctcccgatacaaggccagctcctggctccacagcaccaccagcacatggcgtgacatcagctcccgacactagacctgctcccggatcaaccgctccaccagctcacggcgtgaccagcgcacctgataccagacctgctctgggaagcaccgcccctcccgtgcacaatgtgacatctgcttccggcagcgccagcggctctgcctctacactggtgcacaacggcaccagcgccagagccacaacaaccccagccagcaagagcacccccttcagcatccctagccaccacagcgacacccctaccacactggccagccactccaccaagaccgatgcctctagcacccaccactccagcgtgccccctctgaccagcagcaaccacagcacaagcccccagctgtctaccggcgtctcattcttctttctgtccttccacatcagcaacctgcagttcaacagcagcctggaagatcccagcaccgactactaccaggaactgcagcgggatatcagcgagatgttcctgcaaatctacaagcagggcggcttcctgggcctgagcaacatcaagttcagacccggcagcgtggtggtgcagctgaccctggctttccgggaaggcaccatcaacgtgcacgacgtggaaacccagttcaaccagtacaagaccgaggccgccagccggtacaacctgaccatctccgatgtgtccgtgtccgacgtgcccttcccattctctgcccagtctggcgcaggcgtgccaggatggggaattgctctgctggtgctcgtgtgcgtgctggtggccctggccatcgtgtatctgattgccctggccgtgtgccagtgccggcggaagaattacggccagctggacatcttccccgccagagacacctaccaccccatgagcgagtaccccacataccacacccacggcagatacgtgccacccagctccaccgacagatccccctacgagaaagtgtctgccggcaacggcggcagctccctgagctacacaaatcctgccgtggccgctgcctccgccaacctgtgaagatctgggccctaacaaaacaaaaagatggggttattccctaaacttcatgggttacgtaattggaagttgggggacattgccacaagatcatattgtacaaaagatcaaacactgttttagaaaacttcctgtaaacaggcctattgattggaaagtatgtcaaaggattgtgggtcttttgggctttgctgctccatttacacaatgtggatatcctgccttaatgcctttgtatgcatgtatacaagctaaacaggctttcactttctcgccaacttacaaggcctttctaagtaaacagtacatgaacctttaccccgttgctcggcaacggcctggtctgtgccaagtgtttgctgacgcaacccccactggctggggcttggccataggccatcagcgcatgcgtggaacctttgtggctcctctgccgatccatactgcggaactcctagccgcttgttttgctcgcagccggtctggagcaaagctcataggaactgacaattctgtcgtcctctcgcggaaatatacatcgtttcgatctacgtatgatctttttccctctgccaaaaattatggggacatcatgaagccccttgagcatctgacttctggctaataaaggaaatttattttcattgcaatagtgtgttggaattttttgtgtctctcactcggaaggaattctgcattaatgaatcggccaacgcgcggggagaggcggtttgcgtattgggcgctcttccgcttcctcgctcactgactcgctgcgctcggtcgttcggctgcggcgagcggtatcagctcactcaaaggcggtaatacggttatccacagaatcaggggataacgcaggaaagaacatgtgagcaaaaggccagcaaaaggccaggaaccgtaaaaaggccgcgttgctggcgtttttccataggctccgcccccctgacgagcatcacaaaaatcgacgctcaagtcagaggtggcgaaacccgacaggactataaagataccaggcgtttccccctggaagctccctcgtgcgctctcctgttccgaccctgccgcttaccggatacctgtccgcctttctcccttcgggaagcgtggcgctttctcatagctcacgctgtaggtatctcagttcggtgtaggtcgttcgctccaagctgggctgtgtgcacgaaccccccgttcagcccgaccgctgcgccttatccggtaactatcgtcttgagtccaacccggtaagacacgacttatcgccactggcagcagccactggtaacaggattagcagagcgaggtatgtaggcggtgctacagagttcttgaagtggtggcctaactacggctacactagaagaacagtatttggtatctgcgctctgctgaagccagttaccttcggaaaaagagttggtagctcttgatccggcaaacaaaccaccgctggtagcggtggtttttttgtttgcaagcagcagattacgcgcagaaaaaaaggatctcaagaagatcctttgatcttttctacggggtctgacgctcagtggaacgaaaactcacgttaagggattttggtcatgagattatcaaaaaggatcttcacctagatccttttaaattaaaaatgaagttttaaatcaatctaaagtatatatgagtaaacttggtctgacagttaccaatgcttaatcagtgaggcacctatctcagcgatctgtctatttcgttcatccatagttgcctgactc

SEQ ID NO: 68 - DNA, 36088 bp, Artificial Sequence
  Synthetic Construct
ccatcttcaataatatacctcaaactttttgtgcgcgttaatatgcaaatgaggcgtttgaatttggggaggaagggcggtgattggtcgagggatgagcgaccgttaggggcggggcgagtgacgttttgatgacgtggttgcgaggaggagccagtttgcaagttctcgtgggaaaagtgacgtcaaacgaggtgtggtttgaacacggaaatactcaattttcccgcgctctctgacaggaaatgaggtgtttctgggcggatgcaagtgaaaacgggccattttcgcgcgaaaactgaatgaggaagtgaaaatctgagtaatttcgcgtttatggcagggaggagtatttgccgagggccgagtagactttgaccgattacgtgggggtttcgattaccgtgtttttcacctaaatttccgcgtacggtgtcaaagtccggtgtttttactactgtaatagtaatcaattacggggtcattagttcatagcccatatatggagttccgcgttacataacttacggtaaatggcccgcctggctgaccgcccaacgacccccgcccattgacgtcaataatgacgtatgttcccatagtaacgccaatagggactttccattgacgtcaatgggtggagtatttacggtaaactgcccacttggcagtacatcaagtgtatcatatgccaagtacgccccctattgacgtcaatgacggtaaatggcccgcctggcattatgcccagtacatgaccttatgggactttcctacttggcagtacatctacgtattagtcatcgctattaccatggtgatgcggttttggcagtacatcaatgggcgtggatagcggtttgactcacggggatttccaagtctccaccccattgacgtcaatgggagtttgttttggcaccaaaatcaacgggactttccaaaatgtcgtaacaactccgccccattgacgcaaatgggcggtaggcgtgtacggtgggaggtctatataagcagagctgtccctatcagtgatagagatctccctatcagtgatagagagtttagtgaaccgtcagatccgctagggtaccgcgatcaccatggctagcaagctgaccattgagagcactcccttcaacgtggctgaggggaaggaggtgctgctcctggtgcacaatctgccccagcacctgttcgggtactcctggtacaagggagaacgcgtggacgggaaccggcagatcataggctacgtcatcggaacccagcaggccacacccggtccagcgtacagcggccgggagattatctacccgaacgcctccctgctgatccaaaacatcatccagaacgacaccggtttctacactctgcacgtgattaagtcagatctggtcaacgaagaggccaccggccaattcagggtgtaccccgaactccctaagccgttcatcacctcgaacaacagcaacccggtcgaggatgaagatgcggtggccttgacgtgcgaacctgagatccagaacaccacctacttgtggtgggtgaacaatcagagcctgccagtctccccacgactccagctgtcgaacgacaacaggaccctgactttgctgtccgtgactcggaacgacgtgggcccttatgaatgcggtatccagaacaagctgtccgtggaccacagcgaccctgtgatcctgaacgtcctttacgggccggacgaccccaccatttccccgtcgtacacttactaccggccgggcgtgaacctgtccctgtcgtgccacgctgcctccaatccgccggcccagtactcctggctcatcgacggaaacatccagcagcacacccaagaactgttcatctccaacattaccgagaaaaactcgggactttacacctgtcaagccaacaattccgccagcggccactcccgcaccactgtcaaaactatcactgtgtccgccgaactcccgaagcccagcatcagctccaacaactcgaagcccgtggaggataaggacgctgtcgcgttcacctgtgaaccagaggcacagaataccacctacctttggtgggtcaacggacagtccctgcctgtctcaccgagactgcagctgtcaaacgggaataggactctgaccttgtttaacgtcacccggaacgacgcccgggcctacgtgtgcggcatccagaactccgtgagcgcaaaccggtctgacccagtgaccctggatgtgctgtacggccccgacactccgatcatttcaccccccgattcatcctacctgtccggcgctaacctcaacctctcatgccactccgcatccaaccccagcccgcaatattcgtggcgcattaacggaattcctcagcaacatacccaggtcctgttcattgcgaagatcacccctaacaacaacggaacctacgcctgctttgtgtcaaacctggccactggtagaaacaactccatcgtgaagtccattaccgtgtcggcgtccggatccggcgagggcagaggcagcctgctgacatgtggcgacgtggaagagaaccctggccccggagctgccccggagccggagaggacccccgttggccagggatcgtgggcccatccgggacgcaccaggggaccatccgacaggggattctgtgtggtgtcaccggccaggccagcagaagaggcaaccagcctcgagggagcgttgtctggaaccagacattcccacccgtcggtgggccggcagcaccacgcgggaccaccgtccacttccagaccgccacggccatgggacaccccttgcccgcctgtgtatgccgagactaaacacttcctgtactcatccggagacaaggaacagcttcggccgtccttcctcctgtcgtcgctcagaccgagcctgaccggagcacgcagattggtggaaactatcttccttgggtcacgtccgtggatgccaggtaccccacggcgcctcccgcgcctcccacagagatactggcagatgcggcctctgttcctggaattgctgggaaaccacgctcagtgcccgtacggagtcctgctcaagactcactgccctctgagggcggcggtcactccggcggccggagtgtgcgcacgggagaagccccagggaagcgtggcagctccggaagaggaggacaccgatccgcgccgcctcgtgcaacttctgcgccagcactcctcgccctggcaagtctacgggttcgtccgcgcctgcctgcgccgcctggtgccgcctgggctctggggttcccggcataacgagcgccgcttcctgagaaatactaagaagtttatctcacttggaaaacatgccaagttgtcgctgcaagaactcacgtggaagatgtcagtccgcgattgcgcctggctgcgccgctcgccgggcgtcgggtgtgttccagctgcagaacaccgcctgagagaagaaattctggccaaatttctgcattggctgatgtcagtgtacgtggtcgagctgctgcgctcctttttctacgtcactgagactacctttcaaaagaaccgcctgttcttctaccgcaaatctgtgtggagcaagctgcagtcaatcggcattcgccagcatctgaagagggtgcagctgcgggaactttccgaggcagaagtccgccagcaccgggaggcccggccggcgcttctcacgtcgcgtctgagattcatcccaaagcccgacgggctgaggcctatcgtcaacatggattacgtcgtgggcgctcgcacctttcgccgtgaaaagcgggccgaacgcttgacctcacgggtgaaggccctcttctccgtgctgaactacgagagagcaagacggcctggcctgctgggagcttcggtgctgggactggacgatatccaccgggcttggcggacctttgttctccgggtgagagcccaagaccctccgccggaactgtacttcgtgaaggtggcgatcaccggagcctatgatactattccgcaagatcgactcaccgaagtcatcgcctcgatcatcaaaccgcagaacacttactgcgtcaggcggtacgccgtggtccagaaggccgcgcatggccacgtgagaaaggcgttcaagtcgcacgtgtccactctcaccgacctccagccttacatgaggcaattcgttgcgcatttgcaagagacttcgcccctgagagatgcggtggtcatcgagcagagctccagcctgaacgaagcgagcagcggtctgtttgacgtgttcctccgcttcatgtgtcatcacgcggtgcgaatcaggggaaaatcatacgtgcagtgccagggaatcccacaaggcagcattctgtcgactctcttgtgttccctttgctacggcgatatggaaaacaagctgttcgctgggatcagacgggacgggttgctgctcagactggtggacgacttcctgctggtgactccgcacctcactcacgccaaaacctttctccgcactctggtgaggggagtgccagaatacggctgtgtggtcaatctccggaaaactgtggtgaatttccctgtcgaggatgaggcactcggaggaaccgcatttgtccaaatgccagcacatggcctgttcccatggtgcggtctgctgctggacacccgaactcttgaagtgcagtccgactactccagctatgcccggacgagcatccgcgccagcctcactttcaatcgcggctttaaggccggacgaaacatgcgcagaaagcttttcggagtcctccggcttaaatgccattcgctctttctcgatctccaagtcaattcgctgcagaccgtgtgcacgaacatctacaagatcctgctgctccaagcctaccggttccacgcttgcgtgcttcagctgccgtttcaccaacaggtgtggaagaacccgaccttctttctgcgggtcattagcgatactgcctccctgtgttactcaatcctcaaggcaaagaacgccggaatgtcgctgggtgcgaaaggagccgcgggacctcttcctagcgaagcggtgcagtggctctgccaccaggctttcctcctgaagctgaccaggcacagagtgacctacgtcccgctgctgggctcgctgcgcactgcacagacccagctgtctagaaaactccccggcaccaccctgaccgctctggaagccgccgccaacccagcattgccgtcagatttcaagaccatcttggacggatccggcacaatcctgtctgagggcgccaccaacttcagcctgctgaaactggccggcgacgtggaactgaaccctggccctacccctggaacccagagccccttcttccttctgctgctgctgaccgtgctgactgtcgtgacaggctctggccacgccagctctacacctggcggcgagaaagagacaagcgccacccagagaagcagcgtgccaagcagcaccgagaagaacgccgtgtccatgaccagctccgtgctgagcagccactctcctggcagcggcagcagcacaacacagggccaggatgtgacactggcccctgccacagaacctgcctctggatctgccgccacctggggacaggacgtgacaagcgtgccagtgaccagacctgccctgggctctacaacaccccctgcccacgatgtgaccagcgcccctgataacaagcctgcccctggaagcacagcccctccagctcatggcgtgacctctgccccagataccagaccagccccaggatctacagccccacccgcacacggcgtgacaagtgcccctgacacaagacccgctccaggctctactgctcctcctgcccatggcgtgacaagcgctcccgatacaaggccagctcctggctccacagcaccaccagcacatggcgtgacatcagctcccgacactagacctgctcccggatcaaccgctccaccagctcacggcgtgaccagcgcacctgataccagacctgctctgggaagcaccgcccctcccgtgcacaatgtgacatctgcttccggcagcgccagcggctctgcctctacactggtgcacaacggcaccagcgccagagccacaacaaccccagccagcaagagcacccccttcagcatccctagccaccacagcgacacccctaccacactggccagccactccaccaagaccgatgcctctagcacccaccactccagcgtgccccctctgaccagcagcaaccacagcacaagcccccagctgtctaccggcgtctcattcttctttctgtccttccacatcagcaacctgcagttcaacagcagcctggaagatcccagcaccgactactaccaggaactgcagcgggatatcagcgagatgttcctgcaaatctacaagcagggcggcttcctgggcctgagcaacatcaagttcagacccggcagcgtggtggtgcagctgaccctggctttccgggaaggcaccatcaacgtgcacgacgtggaaacccagttcaaccagtacaagaccgaggccgccagccggtacaacctgaccatctccgatgtgtccgtgtccgacgtgcccttcccattctctgcccagtctggcgcaggcgtgccaggatggggaattgctctgctggtgctcgtgtgcgtgctggtggccctggccatcgtgtatctgattgccctggccgtgtgccagtgccggcggaagaattacggccagctggacatcttccccgccagagacacctaccaccccatgagcgagtaccccacataccacacccacggcagatacgtgccacccagctccaccgacagatccccctacgagaaagtgtctgccggcaacggcggcagctccctgagctacacaaatcctgccgtggccgctgcctccgccaacctgtgacgcacctcgagctgatcataatcagccataccacatttgtagaggttttacttgctttaaaaaacctcccacacctccccctgaacctgaaacataaaatgaatgcaattgttgttgttaacttgtttattgcagcttataatggttacaaataaagcaatagcatcacaaatttcacaaataaagcatttttttcactgcattctagttgtggtttgtccaaactcatcaatgtatcttaccaggtgccgagcctgcgagtgcggagggaagcatgccaggttccagcccgtgtgtgtggatgtgacggaggacctgcgacccgatcatttggtgttgccctgcaccgggacggagttcggttccagcggggaagaatctgactagagtgagtagtgttctggggcgggggaggacctgcatgagggccagaataactgaaatctgtgcttttctgtgtgttgcagcagcatgagcggaagcggctcctttgagggaggggtattcagcccttatctgacggggcgtctcccctcctgggcgggagtgcgtcagaatgtgatgggatccacggtggacggccggcccgtgcagcccgcgaactcttcaaccctgacctatgcaaccctgagctcttcgtcgttggacgcagctgccgccgcagctgctgcatctgccgccagcgccgtgcgcggaatggccatgggcgccggctactacggcactctggtggccaactcgagttccaccaataatcccgccagcctgaacgaggagaagctgttgctgctgatggcccagctcgaggccttgacccagcgcctgggcgagctgacccagcaggtggctcagctgcaggagcagacgcgggccgcggttgccacggtgaaatccaaataaaaaatgaatcaataaataaacggagacggttgttgattttaacacagagtctgaatctttatttgatttttcgcgcgcggtaggccctggaccaccggtctcgatcattgagcacccggtggatcttttccaggacccggtagaggtgggcttggatgttgaggtacatgggcatgagcccgtcccgggggtggaggtagctccattgcagggcctcgtgctcgggggtggtgttgtaaatcacccagtcatagcaggggcgcagggcatggtgttgcacaatatctttgaggaggagactgatggccacgggcagccctttggtgtaggtgtttacaaatctgttgagctgggagggatgcatgcggggggagatgaggtgcatcttggcctggatcttgagattggcgatgttaccgcccagatcccgcctggggttcatgttgtgcaggaccaccagcacggtgtatccggtgcacttggggaatttatcatgcaacttggaagggaaggcgtgaaagaatttggcgacgcctttgtgcccgcccaggttttccatgcactcatccatgatgatggcgatgggcccgtgggcggcggcctgggcaaagacgtttcgggggtcggacacatcatagttgtggtcctgggtgaggtcatcataggccattttaatgaatttggggcggagggtgccggactgggggacaaaggtaccctcgatcccgggggcgtagttcccctcacagatctgcatctcccaggctttgagctcggagggggggatcatgtccacctgcggggcgataaagaacacggtttccggggcgggggagatgagctgggccgaaagcaagttccggagcagctgggacttgccgcagccggtggggccgtagatgaccccgatgaccggctgcaggtggtagttgagggagagacagctgccgtcctcccggaggaggggggccacctcgttcatcatctcgcgcacgtgcatgttctcgcgcaccagttccgccaggaggcgctctccccccagggataggagctcctggagcgaggcgaagtttttcagcggcttgagtccgtcggccatgggcattttggagagggtttgttgcaagagttccaggcggtcccagagctcggtgatgtgctctacggcatctcgatccagcagacctcctcgtttcgcgggttgggacggctgcgggagtagggcaccagacgatgggcgtccagcgcagccagggtccggtccttccagggtcgcagcgtccgcgtcagggtggtctccgtcacggtgaaggggtgcgcgccgggctgggcgcttgcgagggtgcgcttcaggctcatccggctggtcgaaaaccgctcccgatcggcgccctgcgcgtcggccaggtagcaattgaccatgagttcgtagttgagcgcctcggccgcgtggcctttggcgcggagcttacctttggaagtctgcccgcaggcgggacagaggagggacttgagggcgtagagcttgggggcgaggaagacggactcgggggcgtaggcgtccgcgccgcagtgggcgcagacggtctcgcactccacgagccaggtgaggtcgggctggtcggggtcaaaaaccagtttcccgccgttctttttgatgcgtttcttacctttggtctccatgagctcgtgtccccgctgggtgacaaagaggctgtccgtgtccccgtagaccgactttatgggccggtcctcgagcggtgtgccgcggtcctcctcgtagaggaaccccgcccactccgagacgaaagcccgggtccaggccagcacgaaggaggccacgtgggacgggtagcggtcgttgtccaccagcgggtccaccttttccagggtatgcaaacacatgtccccctcgtccacatccaggaaggtgattggcttgtaagtgtaggccacgtgaccgggggtcccggccgggggggtataaaagggtgcgggtccctgctcgtcctcactgtcttccggatcgctgtccaggagcgccagctgttggggtaggtattccctctcgaaggcgggcatgacctcggcactcaggttgtcagtttctagaaacgaggaggatttgatattgacggtgccggcggagatgcctttcaagagcccctcgtccatctggtcagaaaagacgatctttttgttgtcgagcttggtggcgaaggagccgtagagggcgttggagaggagcttggcgatggagcgcatggtctggtttttttccttgtcggcgcgctccttggcggcgatgttgagctgcacgtactcgcgcgccacgcacttccattcggggaagacggtggtcagctcgtcgggcacgattctgacctgccagccccgattatgcagggtgatgaggtccacactggtggccacctcgccgcgcaggggctcattagtccagcagaggcgtccgcccttgcgcgagcagaaggggggcagggggtccagcatgacctcgtcgggggggtcggcatcgatggtgaagatgccgggcaggaggtcggggtcaaagtagctgatggaagtggccagatcgtccagggcagcttgccattcgcgcacggccagcgcgcgctcgtagggactgaggggcgtgccccagggcatgggatgggtaagcgcggaggcgtacatgccgcagatgtcgtagacgtagaggggctcctcgaggatgccgatgtaggtggggtagcagcgccccccgcggatgctggcgcgcacgtagtcatacagctcgtgcgagggggcgaggagccccgggcccaggttggtgcgactgggcttttcggcgcggtagacgatctggcggaaaatggcatgcgagttggaggagatggtgggcctttggaagatgttgaagtgggcgtggggcagtccgaccgagtcgcggatgaagtgggcgtaggagtcttgcagcttggcgacgagctcggcggtgactaggacgtccagagcgcagtagtcgagggtctcctggatgatgtcatacttgagctgtcccttttgtttccacagctcgcggttgagaaggaactcttcgcggtccttccagtactcttcgagggggaacccgtcctgatctgcacggtaagagcctagcatgtagaactggttgacggccttgtaggcgcagcagcccttctccacggggagggcgtaggcctgggcggccttgcgcagggaggtgtgcgtgagggcgaaagtgtccctgaccatgaccttgaggaactggtgcttgaagtcgatatcgtcgcagcccccctgctcccagagctggaagtccgtgcgcttcttgtaggcggggttgggcaaagcgaaagtaacatcgttgaagaggatcttgcccgcgcggggcataaagttgcgagtgatgcggaaaggttggggcacctcggcccggttgttgatgacctgggcggcgagcacgatctcgtcgaagccgttgatgttgtggcccacgatgtagagttccacgaatcgcggacggcccttgacgtggggcagtttcttgagctcctcgtaggtgagctcgtcggggtcgctgagcccgtgctgctcgagcgcccagtcggcgagatgggggttggcgcggaggaaggaagtccagagatccacggccagggcggtttgcagacggtcccggtactgacggaactgctgcccgacggccattttttcgggggtgacgcagtagaaggtgcgggggtccccgtgccagcgatcccatttgagctggagggcgagatcgagggcgagctcgacgagccggtcgtccccggagagtttcatgaccagcatgaaggggacgagctgcttgccgaaggaccccatccaggtgtaggtttccacatcgtaggtgaggaagagcctttcggtgcgaggatgcgagccgatggggaagaactggatctcctgccaccaattggaggaatggctgttgatgtgatggaagtagaaatgccgacggcgcgccgaacactcgtgcttgtgtttatacaagcggccacagtgctcgcaacgctgcacgggatgcacgtgctgcacgagctgtacctgagttcctttgacgaggaatttcagtgggaagtggagtcgtggcgcctgcatctcgtgctgtactacgtcgtggtggtcggcctggccctcttctgcctcgatggtggtcatgctgacgagcccgcgcgggaggcaggtccagacctcggcgcgagcgggtcggagagcgaggacgagggcgcgcaggccggagctgtccagggtcctgagacgctgcggagtcaggtcagtgggcagcggcggcgcgcggttgacttgcaggagtttttccagggcgcgcgggaggtccagatggtacttgatctccaccgcgccattggtggcgacgtcgatggcttgcagggtcccgtgcccctggggtgtgaccaccgtcccccgtttcttcttgggcggctggggcgacgggggcggtgcctcttccatggttagaagcggcggcgaggacgcgcgccgggcggcaggggcggctcggggcccggaggcaggggcggcaggggcacgtcggcgccgcgcgcgggtaggttctggtactgcgcccggagaagactggcgtgagcgacgacgcgacggttgacgtcctggatctgacgcctctgggtgaaggccacgggacccgtgagtttgaacctgaaagagagttcgacagaatcaatctcggtatcgttgacggcggcctgccgcaggatctcttgcacgtcgcccgagttgtcctggtaggcgatctcggtcatgaactgctcgatctcctcctcttgaaggtctccgcggccggcgcgctccacggtggccgcgaggtcgttggagatgcggcccatgagctgcgagaaggcgttcatgcccgcctcgttccagacgcggctgtagaccacgacgccctcgggatcgcgggcgcgcatgaccacctgggcgaggttgagctccacgtggcgcgtgaagaccgcgtagttgcagaggcgctggtagaggtagttgagcgtggtggcgatgtgctcggtgacgaagaaatacatgatccagcggcggagcggcatctcgctgacgtcgcccagcgcctccaaacgttccatggcctcgtaaaagtccacggcgaagttgaaaaactgggagttgcgcgccgagacggtcaactcctcctccagaagacggatgagctcggcgatggtggcgcgcacctcgcgctcgaaggcccccgggagttcctccacttcctcttcttcctcctccactaacatctcttctacttcctcctcaggcggcagtggtggcgggggagggggcctgcgtcgccggcggcgcacgggcagacggtcgatgaagcgctcgatggtctcgccgcgccggcgtcgcatggtctcggtgacggcgcgcccgtcctcgcggggccgcagcgtgaagacgccgccgcgcatctccaggtggccgggggggtccccgttgggcagggagagggcgctgacgatgcatcttatcaattgccccgtagggactccgcgcaaggacctgagcgtctcgagatccacgggatctgaaaaccgctgaacgaaggcttcgagccagtcgcagtcgcaaggtaggctgagcacggtttcttctggcgggtcatgttggttgggagcggggcgggcgatgctgctggtgatgaagttgaaataggcggttctgagacggcggatggtggcgaggagcaccaggtctttgggcccggcttgctggatgcgcagacggtcggccatgccccaggcgtggtcctgacacctggccaggtccttgtagtagtcctgcatgagccgctccacgggcacctcctcctcgcccgcgcggccgtgcatgcgcgtgagcccgaagccgcgctggggctggacgagcgccaggtcggcgacgacgcgctcggcgaggatggcttgctggatctgggtgagggtggtctggaagtcatcaaagtcgacgaagcggtggtaggctccggtgttgatggtgtaggagcagttggccatgacggaccagttgacggtctggtggcccggacgcacgagctcgtggtacttgaggcgcgagtaggcgcgcgtgtcgaagatgtagtcgttgcaggtgcgcaccaggtactggtagccgatgaggaagtgcggcggcggctggcggtagagcggccatcgctcggtggcgggggcgccgggcgcgaggtcctcgagcatggtgcggtggtagccgtagatgtacctggacatccaggtgatgccggcggcggtggtggaggcgcgcgggaactcgcggacgcggttccagatgttgcgcagcggcaggaagtagttcatggtgggcacggtctggcccgtgaggcgcgcgcagtcgtggatgctctatacgggcaaaaacgaaagcggtcagcggctcgactccgtggcctggaggctaagcgaacgggttgggctgcgcgtgtaccccggttcgaatctcgaatcaggctggagccgcagctaacgtggtattggcactcccgtctcgacccaagcctgcaccaaccctccaggatacggaggcgggtcgttttgcaacttttttttggaggccggatgagactagtaagcgcggaaagcggccgaccgcgatggctcgctgccgtagtctggagaagaatcgccagggttgcgttgcggtgtgccccggttcgaggccggccggattccgcggctaacgagggcgtggctgccccgtcgtttccaagaccccatagccagccgacttctccagttacggagcgagcccctcttttgttttgtttgtttttgccagatgcatcccgtactgcggcagatgcgcccccaccaccctccaccgcaacaacagccccctccacagccggcgcttctgcccccgccccagcagcaacttccagccacgaccgccgcggccgccgtgagcggggctggacagagttatgatcaccagctggccttggaagagggcgaggggctggcgcgcctgggggcgtcgtcgccggagcggcacccgcgcgtgcagatgaaaagggacgctcgcgaggcctacgtgcccaagcagaacctgttcagagacaggagcggcgaggagcccgaggagatgcgcgcggcccggttccacgcggggcgggagctgcggcgcggcctggaccgaaagagggtgctgagggacgaggatttcgaggcggacgagctgacggggatcagccccgcgcgcgcgcacgtggccgcggccaacctggtcacggcgtacgagcagaccgtgaaggaggagagcaacttccaaaaatccttcaacaaccacgtgcgcaccctgatcgcgcgcgaggaggtgaccctgggcctgatgcacctgtgggacctgctggaggccatcgtgcagaaccccaccagcaagccgctgacggcgcagctgttcctggtggtgcagcatagtcgggacaacgaagcgttcagggaggcgctgctgaatatcaccgagcccgagggccgctggctcctggacctggtgaacattctgcagagcatcgtggtgcaggagcgcgggctgccgctgtccgagaagctggcggccatcaacttctcggtgctgagtttgggcaagtactacgctaggaagatctacaagaccccgtacgtgcccatagacaaggaggtgaagatcgacgggttttacatgcgcatgaccctgaaagtgctgaccctgagcgacgatctgggggtgtaccgcaacgacaggatgcaccgtgcggtgagcgccagcaggcggcgcgagctgagcgaccaggagctgatgcatagtctgcagcgggccctgaccggggccgggaccgagggggagagctactttgacatgggcgcggacctgcactggcagcccagccgccgggccttggaggcggcggcaggaccctacgtagaagaggtggacgatgaggtggacgaggagggcgagtacctggaagactgatggcgcgaccgtatttttgctagatgcaacaacaacagccacctcctgatcccgcgatgcgggcggcgctgcagagccagccgtccggcattaactcctcggacgattggacccaggccatgcaacgcatcatggcgctgacgacccgcaaccccgaagcctttagacagcagccccaggccaaccggctctcggccatcctggaggccgtggtgccctcgcgctccaaccccacgcacgagaaggtcctggccatcgtgaacgcgctggtggagaacaaggccatccgcggcgacgaggccggcctggtgtacaacgcgctgctggagcgcgtggcccgctacaacagcaccaacgtgcagaccaacctggaccgcatggtgaccgacgtgcgcgaggccgtggcccagcgcgagcggttccaccgcgagtccaacctgggatccatggtggcgctgaacgccttcctcagcacccagcccgccaacgtgccccggggccaggaggactacaccaacttcatcagcgccctgcgcctgatggtgaccgaggtgccccagagcgaggtgtaccagtccgggccggactacttcttccagaccagtcgccagggcttgcagaccgtgaacctgagccaggctttcaagaacttgcagggcctgtggggcgtgcaggccccggtcggggaccgcgcgacggtgtcgagcctgctgacgccgaactcgcgcctgctgctgctgctggtggcccccttcacggacagcggcagcatcaaccgcaactcgtacctgggctacctgattaacctgtaccgcgaggccatcggccaggcgcacgtggacgagcagacctaccaggagatcacccacgtgagccgcgccctgggccaggacgacccgggcaacctggaagccaccctgaactttttgctgaccaaccggtcgcagaagatcccgccccagtacgcgctcagcaccgaggaggagcgcatcctgcgttacgtgcagcagagcgtgggcctgttcctgatgcaggagggggccacccccagcgccgcgctcgacatgaccgcgcgcaacatggagcccagcatgtacgccagcaaccgcccgttcatcaataaactgatggactacttgcatcgggcggccgccatgaactctgactatttcaccaacgccatcctgaatccccactggctcccgccgccggggttctacacgggcgagtacgacatgcccgaccccaatgacgggttcctgtgggacgatgtggacagcagcgtgttctccccccgaccgggtgctaacgagcgccccttgtggaagaaggaaggcagcgaccgacgcccgtcctcggcgctgtccggccgcgagggtgctgccgcggcggtgcccgaggccgccagtcctttcccgagcttgcccttctcgctgaacagtatccgcagcagcgagctgggcaggatcacgcgcccgcgcttgctgggcgaagaggagtacttgaatgactcgctgttgagacccgagcgggagaagaacttccccaataacgggatagaaagcctggtggacaagatgagccgctggaagacgtatgcgcaggagcacagggacgatccccgggcgtcgcagggggccacgagccggggcagcgccgcccgtaaacgccggtggcacgacaggcagcggggacagatgtgggacgatgaggactccgccgacgacagcagcgtgttggacttgggtgggagtggtaacccgttcgctcacctgcgcccccgtatcgggcgcatgatgtaagagaaaccgaaaataaatgatactcaccaaggccatggcgaccagcgtgcgttcgtttcttctctgttgttgttgtatctagtatgatgaggcgtgcgtacccggagggtcctcctccctcgtacgagagcgtgatgcagcaggcgatggcggcggcggcgatgcagcccccgctggaggctccttacgtgcccccgcggtacctggcgcctacggaggggcggaacagcattcgttactcggagctggcacccttgtacgataccacccggttgtacctggtggacaacaagtcggcggacatcgcctcgctgaactaccagaacgaccacagcaacttcctgaccaccgtggtgcagaacaatgacttcacccccacggaggccagcacccagaccatcaactttgacgagcgctcgcggtggggcggccagctgaaaaccatcatgcacaccaacatgcccaacgtgaacgagttcatgtacagcaacaagttcaaggcgcgggtgatggtctcccgcaagacccccaatggggtgacagtgacagaggattatgatggtagtcaggatgagctgaagtatgaatgggtggaatttgagctgcccgaaggcaacttctcggtgaccatgaccatcgacctgatgaacaacgccatcatcgacaattacttggcggtggggcggcagaacggggtgctggagagcgacatcggcgtgaagttcgacactaggaacttcaggctgggctgggaccccgtgaccgagctggtcatgcccggggtgtacaccaacgaggctttccatcccgatattgtcttgctgcccggctgcggggtggacttcaccgagagccgcctcagcaacctgctgggcattcgcaagaggcagcccttccaggaaggcttccagatcatgtacgaggatctggaggggggcaacatccccgcgctcctggatgtcgacgcctatgagaaaagcaaggaggatgcagcagctgaagcaactgcagccgtagctaccgcctctaccgaggtcaggggcgataattttgcaagcgccgcagcagtggcagcggccgaggcggctgaaaccgaaagtaagatagtcattcagccggtggagaaggatagcaagaacaggagctacaacgtactaccggacaagataaacaccgcctaccgcagctggtacctagcctacaactatggcgaccccgagaagggcgtgcgctcctggacgctgctcaccacctcggacgtcacctgcggcgtggagcaagtctactggtcgctgcccgacatgatgcaagacccggtcaccttccgctccacgcgtcaagttagcaactacccggtggtgggcgccgagctcctgcccgtctactccaagagcttcttcaacgagcaggccgtctactcgcagcagctgcgcgccttcacctcgcttacgcacgtcttcaaccgcttccccgagaaccagatcctcgtccgcccgcccgcgcccaccattaccaccgtcagtgaaaacgttcctgctctcacagatcacgggaccctgccgctgcgcagcagtatccggggagtccagcgcgtgaccgttactgacgccagacgccgcacctgcccctacgtctacaaggccctgggcatagtcgcgccgcgcgtcctctcgagccgcaccttctaaatgtccattctcatctcgcccagtaataacaccggttggggcctgcgcgcgcccagcaagatgtacggaggcgctcgccaacgctccacgcaacaccccgtgcgcgtgcgcgggcacttccgcgctccctggggcgccctcaagggccgcgtgcggtcgcgcaccaccgtcgacgacgtgatcgaccaggtggtggccgacgcgcgcaactacacccccgccgccgcgcccgtctccaccgtggacgccgtcatcgacagcgtggtggccgacgcgcgccggtacgcccgcgccaagagccggcggcggcgcatcgcccggcggcaccggagcacccccgccatgcgcgcggcgcgagccttgctgcgcagggccaggcgcacgggacgcagggccatgctcagggcggccagacgcgcggcttcaggcgccagcgccggcaggacccggagacgcgcggccacggcggcggcagcggccatcgccagcatgtcccgcccgcggcgagggaacgtgtactgggtgcgcgacgccgccaccggtgtgcgcgtgcccgtgcgcacccgcccccctcgcacttgaagatgttcacttcgcgatgttgatgtgtcccagcggcgaggaggatgtccaagcgcaaattcaaggaagagatgctccaggtcatcgcgcctgagatctacggccctgcggtggtgaaggaggaaagaaagccccgcaaaatcaagcgggtcaaaaaggacaaaaaggaagaagaaagtgatgtggacggattggtggagtttgtgcgcgagttcgccccccggcggcgcgtgcagtggcgcgggcggaaggtgcaaccggtgctgagacccggcaccaccgtggtcttcacgcccggcgagcgctccggcaccgcttccaagcgctcctacgacgaggtgtacggggatgatgatattctggagcaggcggccgagcgcctgggcgagtttgcttacggcaagcgcagccgttccgcaccgaaggaagaggcggtgtccatcccgctggaccacggcaaccccacgccgagcctcaagcccgtgaccttgcagcaggtgctgccgaccgcggcgccgcgccgggggttcaagcgcgagggcgaggatctgtaccccaccatgcagctgatggtgcccaagcgccagaagctggaagacgtgctggagaccatgaaggtggacccggacgtgcagcccgaggtcaaggtgcggcccatcaagcaggtggccccgggcctgggcgtgcagaccgtggacatcaagattcccacggagcccatggaaacgcagaccgagcccatgatcaagcccagcaccagcaccatggaggtgcagacggatccctggatgccatcggctcctagtcgaagaccccggcgcaagtacggcgcggccagcctgctgatgcccaactacgcgctgcatccttccatcatccccacgccgggctaccgcggcacgcgcttctaccgcggtcataccagcagccgccgccgcaagaccaccactcgccgccgccgtcgccgcaccgccgctgcaaccacccctgccgccctggtgcggagagtgtaccgccgcggccgcgcacctctgaccctgccgcgcgcgcgctaccacccgagcatcgccatttaaactttcgcctgctttgcagatcaatggccctcacatgccgccttcgcgttcccattacgggctaccgaggaagaaaaccgcgccgtagaaggctggcggggaacgggatgcgtcgccaccaccaccggcggcggcgcgccatcagcaagcggttggggggaggcttcctgcccgcgctgatccccatcatcgccgcggcgatcggggcgatccccggcattgcttccgtggcggtgcaggcctctcagcgccactgagacacacttggaaacatcttgtaataaaccaatggactctgacgctcctggtcctgtgatgtgttttcgtagacagatggaagacatcaatttttcgtccctggctccgcgacacggcacgcggccgttcatgggcacctggagcgacatcggcaccagccaactgaacgggggcgccttcaattggagcagtctctggagcgggcttaagaatttcgggtccacgcttaaaacctatggcagcaaggcgtggaacagcaccacagggcaggcgctgagggataagctgaaagagcagaacttccagcagaaggtggtcgatgggctcgcctcgggcatcaacggggtggtggacctggccaaccaggccgtgcagcggcagatcaacagccgcctggacccggtgccgcccgccggctccgtggagatgccgcaggtggaggaggagctgcctcccctggacaagcggggcgagaagcgaccccgccccgatgcggaggagacgctgctgacgcacacggacgagccgcccccgtacgaggaggcggtgaaactgggtctgcccaccacgcggcccatcgcgcccctggccaccggggtgctgaaacccgaaaagcccgcgaccctggacttgcctcctccccagccttcccgcccctctacagtggctaagcccctgccgccggtggccgtggcccgcgcgcgacccgggggcaccgcccgccctcatgcgaactggcagagcactctgaacagcatcgtgggtctgggagtgcagagtgtgaagcgccgccgctgctattaaacctaccgtagcgcttaacttgcttgtctgtgtgtgtatgtattatgtcgccgccgccgctgtccaccagaaggaggagtgaagaggcgcgtcgccgagttgcaagatggccaccccatcgatgctgccccagtgggcgtacatgcacatcgccggacaggacgcttcggagtacctgagtccgggtctggtgcagtttgcccgcgccacagacacctacttcagtctggggaacaagtttaggaaccccacggtggcgcccacgcacgatgtgaccaccgaccgcagccagcggctgacgctgcgcttcgtgcccgtggaccgcgaggacaacacctactcgtacaaagtgcgctacacgctggccgtgggcgacaaccgcgtgctggacatggccagcacctactttgacatccgcggcgtgctggatcggggccctagcttcaaaccctactccggcaccgcctacaacagtctggcccccaagggagcacccaacacttgtcagtggacatataaagccgatggtgaaactgccacagaaaaaacctatacatatggaaatgcacccgtgcagggcattaacatcacaaaagatggtattcaacttggaactgacaccgatgatcagccaatctacgcagataaaacctatcagcctgaacctcaagtgggtgatgctgaatggcatgacatcactggtactgatgaaaagtatggaggcagagctcttaagcctgataccaaaatgaagccttgttatggttcttttgccaagcctactaataaagaaggaggtcaggcaaatgtgaaaacaggaacaggcactactaaagaatatgacatagacatggctttctttgacaacagaagtgcggctgctgctggcctagctccagaaattgttttgtatactgaaaatgtggatttggaaactccagatacccatattgtatacaaagcaggcacagatgacagcagctcttctattaatttgggtcagcaagccatgcccaacagacctaactacattggtttcagagacaactttatcgggctcatgtactacaacagcactggcaatatgggggtgctggccggtcaggcttctcagctgaatgctgtggttgacttgcaagacagaaacaccgagctgtcctaccagctcttgcttgactctctgggtgacagaacccggtatttcagtatgtggaatcaggcggtggacagctatgatcctgatgtgcgcattattgaaaatcatggtgtggaggatgaacttcccaactattgtttccctctggatgctgttggcagaacagatacttatcagggaattaaggctaatggaactgatcaaaccacatggaccaaagatgacagtgtcaatgatgctaatgagataggcaagggtaatccattcgccatggaaatcaacatccaagccaacctgtggaggaacttcctctacgccaacgtggccctgtacctgcccgactcttacaagtacacgccggccaatgttaccctgcccaccaacaccaacacctacgattacatgaacggccgggtggtggcgccctcgctggtggactcctacatcaacatcggggcgcgctggtcgctggatcccatggacaacgtgaaccccttcaaccaccaccgcaatgcggggctgcgctaccgctccatgctcctgggcaacgggcgctacgtgcccttccacatccaggtgccccagaaatttttcgccatcaagagcctcctgctcctgcccgggtcctacacctacgagtggaacttccgcaaggacgtcaacatgatcctgcagagctccctcggcaacgacctgcgcacggacggggcctccatctccttcaccagcatcaacctctacgccaccttcttccccatggcgcacaacacggcctccacgctcgaggccatgctgcgcaacgacaccaacgaccagtccttcaacgactacctctcggcggccaacatgctctaccccatcccggccaacgccaccaacgtgcccatctccatcccctcgcgcaactgggccgccttccgcggctggtccttcacgcgtctcaagaccaaggagacgccctcgctgggctccgggttcgacccctacttcgtctactcgggctccatcccctacctcgacggcaccttctacctcaaccacaccttcaagaaggtctccatcaccttcgactcctccgtcagctggcccggcaacgaccggctcctgacgcccaacgagttcgaaatcaagcgcaccgtcgacggcgagggctacaacgtggcccagtgcaacatgaccaaggactggttcctggtccagatgctggcccactacaacatcggctaccagggcttctacgtgcccgagggctacaaggaccgcatgtactccttcttccgcaacttccagcccatgagccgccaggtggtggacgaggtcaactacaaggactaccaggccgtcaccctggcctaccagcacaacaactcgggcttcgtcggctacctcgcgcccaccatgcgccagggccagccctaccccgccaactacccctacccgctcatcggcaagagcgccgtcaccagcgtcacccagaaaaagttcctctgcgacagggtcatgtggcgcatccccttctccagcaacttcatgtccatgggcgcgctcaccgacctcggccagaacatgctctatgccaactccgcccacgcgctagacatgaatttcgaagtcgaccccatggatgagtccacccttctctatgttgtcttcgaagtcttcgacgtcgtccgagtgcaccagccccaccgcggcgtcatcgaggccgtctacctgcgcacccccttctcggccggtaacgccaccacctaagctcttgcttcttgcaagccatggccgcgggctccggcgagcaggagctcagggccatcatccgcgacctgggctgcgggccctacttcctgggcaccttcgataagcgcttcccgggattcatggccccgcacaagctggcctgcgccatcgtcaacacggccggccgcgagaccgggggcgagcactggctggccttcgcctggaacccgcgctcgaacacctgctacctcttcgaccccttcgggttctcggacgagcgcctcaagcagatctaccagttcgagtacgagggcctgctgcgccgcagcgccctggccaccgaggaccgctgcgtcaccctggaaaagtccacccagaccgtgcagggtccgcgctcggccgcctgcgggctcttctgctgcatgttcctgcacgccttcgtgcactggcccgaccgccccatggacaagaaccccaccatgaacttgctgacgggggtgcccaacggcatgctccagtcgccccaggtggaacccaccctgcgccgcaaccaggaggcgctctaccgcttcctcaactcccactccgcctactttcgctcccaccgcgcgcgcatcgagaaggccaccgccttcgaccgcatgaatcaagacatgtaaaccgtgtgtgtatgttaaatgtctttaataaacagcactttcatgttacacatgcatctgagatgatttatttagaaatcgaaagggttctgccgggtctcggcatggcccgcgggcagggacacgttgcggaactggtacttggccagccacttgaactcggggatcagcagtttgggcagcggggtgtcggggaaggagtcggtccacagcttccgcgtcagttgcagggcgcccagcaggtcgggcgcggagatcttgaaatcgcagttgggacccgcgttctgcgcgcgggagttgcggtacacggggttgcagcactggaacaccatcagggccgggtgcttcacgctcgccagcaccgtcgcgtcggtgatgctctccacgtcgaggtcctcggcgttggccatcccgaagggggtcatcttgcaggtctgccttcccatggtgggcacgcacccgggcttgtggttgcaatcgcagtgcagggggatcagcatcatctgggcctggtcggcgttcatccccgggtacatggccttcatgaaagcctccaattgcctgaacgcctgctgggccttggctccctcggtgaagaagaccccgcaggacttgctagagaactggttggtggcgcacccggcgtcgtgcacgcagcagcgcgcgtcgttgttggccagctgcaccacgctgcgcccccagcggttctgggtgatcttggcccggtcggggttctccttcagcgcgcgctgcccgttctcgctcgccacatccatctcgatcatgtgctccttctggatcatggtggtcccgtgcaggcaccgcagcttgccctcggcctcggtgcacccgtgcagccacagcgcgcacccggtgcactcccagttcttgtgggcgatctgggaatgcgcgtgcacgaagccctgcaggaagcggcccatcatggtggtcagggtcttgttgctagtgaaggtcagcggaatgccgcggtgctcctcgttgatgtacaggtggcagatgcggcggtacacctcgccctgctcgggcatcagctggaagttggctttcaggtcggtctccacgcggtagcggtccatcagcatagtcatgatttccatacccttctcccaggccgagacgatgggcaggctcatagggttcttcaccatcatcttagcgctagcagccgcggccagggggtcgctctcgtccagggtctcaaagctccgcttgccgtccttctcggtgatccgcaccggggggtagctgaagcccacggccgccagctcctcctcggcctgtctttcgtcctcgctgtcctggctgacgtcctgcaggaccacatgcttggtcttgcggggtttcttcttgggcggcagcggcggcggagatgttggagatggcgagggggagcgcgagttctcgctcaccactactatctcttcctcttcttggtccgaggccacgcggcggtaggtatgtctcttcgggggcagaggcggaggcgacgggctctcgccgccgcgacttggcggatggctggcagagccccttccgcgttcgggggtgcgctcccggcggcgctctgactgacttcctccgcggccggccattgtgttctcctagggaggaacaacaagcatggagactcagccatcgccaacctcgccatctgcccccaccgccgacgagaagcagcagcagcagaatgaaagcttaaccgccccgccgcccagccccgccacctccgacgcggccgtcccagacatgcaagagatggaggaatccatcgagattgacctgggctatgtgacgcccgcggagcacgaggaggagctggcagtgcgcttttcacaagaagagatacaccaagaacagccagagcaggaagcagagaatgagcagagtcaggctgggctcgagcatgacggcgactacctccacctgagcgggggggaggacgcgctcatcaagcatctggcccggcaggccaccatcgtcaaggatgcgctgctcgaccgcaccgaggtgcccctcagcgtggaggagctcagccgcgcctacgagttgaacctcttctcgccgcgcgtgccccccaagcgccagcccaatggcacctgcgagcccaacccgcgcctcaacttctacccggtcttcgcggtgcccgaggccctggccacctaccacatctttttcaagaaccaaaagatccccgtctcctgccgcgccaaccgcacccgcgccgacgcccttttcaacctgggtcccggcgcccgcctacctgatatcgcctccttggaagaggttcccaagatcttcgagggtctgggcagcgacgagactcgggccgcgaacgctctgcaaggagaaggaggagagcatgagcaccacagcgccctggtcgagttggaaggcgacaacgcgcggctggcggtgctcaaacgcacggtcgagctgacccatttcgcctacccggctctgaacctgccccccaaagtcatgagcgcggtcatggaccaggtgctcatcaagcgcgcgtcgcccatctccgaggacgagggcatgcaagactccgaggagggcaagcccgtggtcagcgacgagcagctggcccggtggctgggtcctaatgctagtccccagagtttggaagagcggcgcaaactcatgatggccgtggtcctggtgaccgtggagctggagtgcctgcgccgcttcttcgccgacgcggagaccctgcgcaaggtcgaggagaacctgcactacctcttcaggcacgggttcgtgcgccaggcctgcaagatctccaacgtggagctgaccaacctggtctcctacatgggcatcttgcacgagaaccgcctggggcagaacgtgctgcacaccaccctgcgcggggaggcccggcgcgactacatccgcgactgcgtctacctctacctctgccacacctggcagacgggcatgggcgtgtggcagcagtgtctggaggagcagaacctgaaagagctctgcaagctcctgcagaagaacctcaagggtctgtggaccgggttcgacgagcgcaccaccgcctcggacctggccgacctcattttccccgagcgcctcaggctgacgctgcgcaacggcctgcccgactttatgagccaaagcatgttgcaaaactttcgctctttcatcctcgaacgctccggaatcctgcccgccacctgctccgcgctgccctcggacttcgtgccgctgaccttccgcgagtgccccccgccgctgtggagccactgctacctgctgcgcctggccaactacctggcctaccactcggacgtgatcgaggacgtcagcggcgagggcctgctcgagtgccactgccgctgcaacctctgcacgccgcaccgctccctggcctgcaacccccagctgctgagcgagacccagatcatcggcaccttcgagttgcaagggcccagcgaaggcgagggttcagccgccaaggggggtctgaaactcaccccggggctgtggacctcggcctacttgcgcaagttcgtgcccgaggactaccatcccttcgagatcaggttctacgaggaccaatcccatccgcccaaggccgagctgtcggcctgcgtcatcacccagggggcgatcctggcccaattgcaagccatccagaaatcccgccaagaattcttgctgaaaaagggccgcggggtctacctcgacccccagaccggtgaggagctcaaccccggcttcccccaggatgccccgaggaaacaagaagctgaaagtggagctgccgcccgtggaggatttggaggaagactgggagaacagcagtcaggcagaggaggaggagatggaggaagactgggacagcactcaggcagaggaggacagcctgcaagacagtctggaggaagacgaggaggaggcagaggaggaggtggaagaagcagccgccgccagaccgtcgtcctcggcgggggagaaagcaagcagcacggataccatctccgctccgggtcggggtcccgctcgaccacacagtagatgggacgagaccggacgattcccgaaccccaccacccagaccggtaagaaggagcggcagggatacaagtcctggcgggggcacaaaaacgccatcgtctcctgcttgcaggcctgcgggggcaacatctccttcacccggcgctacctgctcttccaccgcggggtgaactttccccgcaacatcttgcattactaccgtcacctccacagcccctactacttccaagaagaggcagcagcagcagaaaaagaccagcagaaaaccagcagctagaaaatccacagcggcggcagcaggtggactgaggatcgcggcgaacgagccggcgcaaacccgggagctgaggaaccggatctttcccaccctctatgccatcttccagcagagtcgggggcaggagcaggaactgaaagtcaagaaccgttctctgcgctcgctcacccgcagttgtctgtatcacaagagcgaagaccaacttcagcgcactctcgaggacgccgaggctctcttcaacaagtactgcgcgctcactcttaaagagtagcccgcgcccgcccagtcgcagaaaaaggcgggaattacgtcacctgtgcccttcgccctagccgcctccacccatcatcatgagcaaagagattcccacgccttacatgtggagctaccagccccagatgggcctggccgccggtgccgcccaggactactccacccgcatgaattggctcagcgccgggcccgcgatgatctcacgggtgaatgacatccgcgcccaccgaaaccagatactcctagaacagtcagcgctcaccgccacgccccgcaatcacctcaatccgcgtaattggcccgccgccctggtgtaccaggaaattccccagcccacgaccgtactacttccgcgagacgcccaggccgaagtccagctgactaactcaggtgtccagctggcgggcggcgccaccctgtgtcgtcaccgccccgctcagggtataaagcggctggtgatccggggcagaggcacacagctcaacgacgaggtggtgagctcttcgctgggtctgcgacctgacggagtcttccaactcgccggatcggggagatcttccttcacgcctcgtcaggccgtcctgactttggagagttcgtcctcgcagccccgctcgggtggcatcggcactctccagttcgtggaggagttcactccctcggtctacttcaaccccttctccggctcccccggccactacccggacgagttcatcccgaacttcgacgccatcagcgagtcggtggacggctacgattgaatgtcccatggtggcgcagctgacctagctcggcttcgacacctggaccactgccgccgcttccgctgcttcgctcgggatctcgccgagtttgcctactttgagctgcccgaggagcaccctcagggcccggcccacggagtgcggatcgtcgtcgaagggggcctcgactcccacctgcttcggatcttcagccagcgtccgatcctggtcgagcgcgagcaaggacagacccttctgactctgtactgcatctgcaaccaccccggcctgcatgaaagtctttgttgtctgctgtgtactgagtataataaaagctgagatcagcgactactccggacttccgtgtgtttaaactcacccccttatccagtgaaataaagatcatattgatgatgattttacagaaataaaaaataatcatttgatttgaaataaagatacaatcatattgatgatttgagtttaacaaaaaaataaagaatcacttacttgaaatctgataccaggtctctgtccatgttttctgccaacaccacttcactcccctcttcccagctctggtactgcaggccccggcgggctgcaaacttcctccacacgctgaaggggatgtcaaattcctcctgtccctcaatcttcattttatcttctatcagatgtccaaaaagcgcgtccgggtggatgatgacttcgaccccgtctacccctacgatgcagacaacgcaccgaccgtgcccttcatcaacccccccttcgtctcttcagatggattccaagagaagcccctgggggtgttgtccctgcgactggccgaccccgtcaccaccaagaacggggaaatcaccctcaagctgggagagggggtggacctcgattcctcgggaaaactcatctccaacacggccaccaaggccgccgcccctctcagtttttccaacaacaccatttcccttaacatggatcaccccttttacactaaagatggaaaattatccttacaagtttctccaccattaaatatactgagaacaagcattctaaacacactagctttaggttttggatcaggtttaggactccgtggctctgccttggcagtacagttagtctctccacttacatttgatactgatggaaacataaagcttaccttagacagaggtttgcatgttacaacaggagatgcaattgaaagcaacataagctgggctaaaggtttaaaatttgaagatggagccatagcaaccaacattggaaatgggttagagtttggaagcagtagtacagaaacaggtgttgatgatgcttacccaatccaagttaaacttggatctggccttagctttgacagtacaggagccataatggctggtaacaaagaagacgataaactcactttgtggacaacacctgatccatcaccaaactgtcaaatactcgcagaaaatgatgcaaaactaacactttgcttgactaaatgtggtagtcaaatactggccactgtgtcagtcttagttgtaggaagtggaaacctaaaccccattactggcaccgtaagcagtgctcaggtgtttctacgttttgatgcaaacggtgttcttttaacagaacattctacactaaaaaaatactgggggtataggcagggagatagcatagatggcactccatataccaatgctgtaggattcatgcccaatttaaaagcttatccaaagtcacaaagttctactactaaaaataatatagtagggcaagtatacatgaatggagatgtttcaaaacctatgcttctcactataaccctcaatggtactgatgacagcaacagtacatattcaatgtcattttcatacacctggactaatggaagctatgttggagcaacatttggggctaactcttataccttctcatacatcgcccaagaatgaacactgtatcccaccctgcatgccaacccttcccaccccactctgtggaacaaactctgaaacacaaaataaaataaagttcaagtgttttattgattcaacagttttacaggattcgagcagttatttttcctccaccctcccaggacatggaatacaccaccctctccccccgcacagccttgaacatctgaatgccattggtgatggacatgcttttggtctccacgttccacacagtttcagagcgagccagtctcgggtcggtcagggagatgaaaccctccgggcactcccgcatctgcacctcacagctcaacagctgaggattgtcctcggtggtcgggatcacggttatctggaagaagcagaagagcggcggtgggaatcatagtccgcgaacgggatcggccggtggtgtcgcatcaggccccgcagcagtcgctgccgccgccgctccgtcaagctgctgctcagggggtccgggtccagggactccctcagcatgatgcccacggccctcagcatcagtcgtctggtgcggcgggcgcagcagcgcatgcggatctcgctcaggtcgctgcagtacgtgcaacacagaaccaccaggttgttcaacagtccatagttcaacacgctccagccgaaactcatcgcgggaaggatgctacccacgtggccgtcgtaccagatcctcaggtaaatcaagtggtgccccctccagaacacgctgcccacgtacatgatctccttgggcatgtggcggttcaccacctcccggtaccacatcaccctctggttgaacatgcagccccggatgatcctgcggaaccacagggccagcaccgccccgcccgccatgcagcgaagagaccccgggtcccggcaatggcaatggaggacccaccgctcgtacccgtggatcatctgggagctgaacaagtctatgttggcacagcacaggcatatgctcatgcatctcttcagcactctcaactcctcgggggtcaaaaccatatcccagggcacggggaactcttgcaggacagcgaaccccgcagaacagggcaatcctcgcacagaacttacattgtgcatggacagggtatcgcaatcaggcagcaccgggtgatcctccaccagagaagcgcgggtctcggtctcctcacagcgtggtaagggggccggccgatacgggtgatggcgggacgcggctgatcgtgttcgcgaccgtgtcatgatgcagttgctttcggacattttcgtacttgctgtagcagaacctggtccgggcgctgcacaccgatcgccggcggcggtctcggcgcttggaacgctcggtgttgaaattgtaaaacagccactctctcagaccgtgcagcagatctagggcctcaggagtgatgaagatcccatcatgcctgatggctctgatcacatcgaccaccgtggaatgggccagacccagccagatgatgcaattttgttgggtttcggtgacggcgggggagggaagaacaggaagaaccatgattaacttttaatccaaacggtctcggagtacttcaaaatgaagatcgcggagatggcacctctcgcccccgctgtgttggtggaaaataacagccaggtcaaaggtgatacggttctcgagatgttccacggtggcttccagcaaagcctccacgcgcacatccagaaacaagacaatagcgaaagcgggagggttctctaattcctcaatcatcatgttacactcctgcaccatccccagataattttcatttttccagccttgaatgattcgaactagttcctgaggtaaatccaagccagccatgataaagagctcgcgcagagcgccctccaccggcattcttaagcacaccctcataattccaagatattctgctcctggttcacctgcagcagattgacaagcggaatatcaaaatctctgccgcgatccctgagctcctccctcagcaataactgtaagtactctttcatatcctctccgaaatttttagccataggaccaccaggaataagattagggcaagccacagtacagataaaccgaagtcctccccagtgagcattgccaaatgcaagactgctataagcatgctggctagacccggtgatatcttccagataactggacagaaaatcgcccaggcaatttttaagaaaatcaacaaaagaaaaatcctccaggtggacgtttagagcctcgggaacaacgatgaagtaaatgcaagcggtgcgttccagcatggttagttagctgatctgtagaaaaaacaaaaatgaacattaaaccatgctagcctggcgaacaggtgggtaaatcgttctctccagcaccaggcaggccacggggtctccggcgcgaccctcgtaaaaattgtcgctatgattgaaaaccatcacagagagacgttcccggtggccggcgtgaatgattcgacaagatgaatacacccccggaacattggcgtccgcgagtgaaaaaaagcgcccgaggaagcaataaggcactacaatgctcagtctcaagtccagcaaagcgatgccatgcggatgaagcacaaaattctcaggtgcgtacaaaatgtaattactcccctcctgcacaggcagcaaagcccccgatccctccaggtacacatacaaagcctcagcgtccatagcttaccgagcagcagcacacaacaggcgcaagagtcagagaaaggctgagctctaacctgtccacccgctctctgctcaatatatagcccagatctacactgacgtaaaggccaaagtctaaaaatacccgccaaataatcacacacgcccagcacacgcccagaaaccggtgacacactcaaaaaaatacgcgcacttcctcaaacgcccaaaactgccgtcatttccgggttcccacgctacgtcatcaaaacacgactttcaaattccgtcgaccgttaaaaacgtcacccgccccgcccctaacggtcgcccgtctctcagccaatcagcgccccgcatccccaaattcaaacacctcatttgcatattaacgcgcacaaaaagtttgaggtatattattgatgatgg

SEQ ID NO: 69 - DNA, 7011 bp, Artificial Sequence
  Synthetic Construct
ggcgtaatgctctgccagtgttacaaccaattaaccaattctgattagaaaaactcatcgagcatcaaatgaaactgcaatttattcatatcaggattatcaataccatatttttgaaaaagccgtttctgtaatgaaggagaaaactcaccgaggcagttccataggatggcaagatcctggtatcggtctgcgattccgactcgtccaacatcaatacaacctattaatttcccctcgtcaaaaataaggttatcaagtgagaaatcaccatgagtgacgactgaatccggtgagaatggcaaaagcttatgcatttctttccagacttgttcaacaggccagccattacgctcgtcatcaaaatcactcgcatcaaccaaaccgttattcattcgtgattgcgcctgagcgagacgaaatacgcgatcgctgttaaaaggacaattacaaacaggaatcaaatgcaaccggcgcaggaacactgccagcgcatcaacaatattttcacctgaatcaggatattcttctaatacctggaatgctgttttcccggggatcgcagtggtgagtaaccatgcatcatcaggagtacggataaaatgcttgatggtcggaagaggcataaattccgtcagccagtttagtctgaccatctcatctgtaacatcattggcaacgctacctttgccatgtttcagaaacaactctggcgcatcgggcttcccatacaatcgatagattgtcgcacctgattgcccgacattatcgcgagcccatttatacccatataaatcagcatccatgttggaatttaatcgcggcctcgagcaagacgtttcccgttgaatatggctcataacaccccttgtattactgtttatgtaagcagacaggtcgacaatattggctattggccattgcatacgttgtatctatatcataatatgtacatttatattggctcatgtccaatatgaccgccatgttgacattgattattgactagttattaatagtaatcaattacggggtcattagttcatagcccatatatggagttccgcgttacataacttacggtaaatggcccgcctggctgaccgcccaacgacccccgcccattgacgtcaataatgacgtatgttcccatagtaacgccaatagggactttccattgacgtcaatgggtggagtatttacggtaaactgcccacttggcagtacatcaagtgtatcatatgccaagtccgccccctattgacgtcaatgacggtaaatggcccgcctggcattatgcccagtacatgaccttacgggactttcctacttggcagtacatctacgtattagtcatcgctattaccatggtgatgcggttttggcagtacaccaatgggcgtggatagcggtttgactcacggggatttccaagtctccaccccattgacgtcaatgggagtttgttttggcaccaaaatcaacgggactttccaaaatgtcgtaataaccccgccccgttgacgcaaatgggcggtaggcgtgtacggtgggaggtctatataagcagagctcgtttagtgaaccgtcagatcgcctggagacgccatccacgctgttttgacctccatagaagacaccgggaccgatccagcctccgcggccgggaacggtgcattggaacgcggattccccgtgccaagagtgactcaccgtccggatctcagcaagcaggtatgtactctccagggtgggcctggcttccccagtcaagactccagggatttgagggacgctgtgggctcttctcttacatgtaccttttgcttgcctcaaccctgactatcttccaggtcaggatcccagagtcaggggtctgtattttcctgctggtggctccagttcaggaacagtaaaccctgctccgaatattgcctctcacatctcgtcaatctccgcgaggactggggaccctgtgacgaacatggctagcacccctggaacccagagccccttcttccttctgctgctgctgaccgtgctgactgtcgtgacaggctctggccacgccagctctacacctggcggcgagaaagagacaagcgccacccagagaagcagcgtgccaagcagcaccgagaagaacgccgtgtccatgaccagctccgtgctgagcagccactctcctggcagcggcagcagcacaacacagggccaggatgtgacactggcccctgccacagaacctgcctctggatctgccgccacctggggacaggacgtgacaagcgtgccagtgaccagacctgccctgggctctacaacaccccctgcccacgatgtgaccagcgcccctgataacaagcctgcccctggaagcacagcccctccagctcatggcgtgacctctgccccagataccagaccagccccaggatctacagccccacccgcacacggcgtgacaagtgcccctgacacaagacccgctccaggctctactgctcctcctgcccatggcgtgacaagcgctcccgatacaaggccagctcctggctccacagcaccaccagcacatggcgtgacatcagctcccgacactagacctgctcccggatcaaccgctccaccagctcacggcgtgaccagcgcacctgataccagacctgctctgggaagcaccgcccctcccgtgcacaatgtgacatctgcttccggcagcgccagcggctctgcctctacactggtgcacaacggcaccagcgccagagccacaacaaccccagccagcaagagcacccccttcagcatccctagccaccacagcgacacccctaccacactggccagccactccaccaagaccgatgcctctagcacccaccactccagcgtgccccctctgaccagcagcaaccacagcacaagcccccagctgtctaccggcgtctcattcttctttctgtccttccacatcagcaacctgcagttcaacagcagcctggaagatcccagcaccgactactaccaggaactgcagcgggatatcagcgagatgttcctgcaaatctacaagcagggcggcttcctgggcctgagcaacatcaagttcagacccggcagcgtggtggtgcagctgaccctggctttccgggaaggcaccatcaacgtgcacgacgtggaaacccagttcaaccagtacaagaccgaggccgccagccggtacaacctgaccatctccgatgtgtccgtgtccgacgtgcccttcccattctctgcccagtctggcgcaggcgtgccaggatggggaattgctctgctggtgctcgtgtgcgtgctggtggccctggccatcgtgtatctgattgccctggccgtgtgccagtgccggcggaagaattacggccagctggacatcttccccgccagagacacctaccaccccatgagcgagtaccccacataccacacccacggcagatacgtgccacccagctccaccgacagatccccctacgagaaagtgtctgccggcaacggcggcagctccctgagctacacaaatcctgccgtggccgctgcctccgccaacctgggatccggcagaatcttcaacgcccactacgccggctacttcgccgacctgctgatccacgacatcgagacaaaccctggccccgaatcgccaagcgcaccccctcatcggtggtgcatcccttggcaacgcctcctcctgaccgcctcactgctgactttctggaacccgccgaccaccgcaaagctgaccattgagagcactcccttcaacgtggctgaggggaaggaggtgctgctcctggtgcacaatctgccccagcacctgttcgggtactcctggtacaagggagaacgcgtggacgggaaccggcagatcataggctacgtcatcggaacccagcaggccacacccggtccagcgtacagcggccgggagattatctacccgaacgcctccctgctgatccaaaacatcatccagaacgacaccggtttctacactctgcacgtgattaagtcagatctggtcaacgaagaggccaccggccaattcagggtgtaccccgaactccctaagccgttcatcacctcgaacaacagcaacccggtcgaggatgaagatgcggtggccttgacgtgcgaacctgagatccagaacaccacctacttgtggtgggtgaacaatcagagcctgccagtctccccacgactccagctgtcgaacgacaacaggaccctgactttgctgtccgtgactcggaacgacgtgggcccttatgaatgcggtatccagaacaagctgtccgtggaccacagcgaccctgtgatcctgaacgtcctttacgggccggacgaccccaccatttccccgtcgtacacttactaccggccgggcgtgaacctgtccctgtcgtgccacgctgcctccaatccgccggcccagtactcctggctcatcgacggaaacatccagcagcacacccaagaactgttcatctccaacattaccgagaaaaactcgggactttacacctgtcaagccaacaattccgccagcggccactcccgcaccactgtcaaaactatcactgtgtccgccgaactcccgaagcccagcatcagctccaacaactcgaagcccgtggaggataaggacgctgtcgcgttcacctgtgaaccagaggcacagaataccacctacctttggtgggtcaacggacagtccctgcctgtctcaccgagactgcagctgtcaaacgggaataggactctgaccttgtttaacgtcacccggaacgacgcccgggcctacgtgtgcggcatccagaactccgtgagcgcaaaccggtctgacccagtgaccctggatgtgctgtacggccccgacactccgatcatttcaccccccgattcatcctacctgtccggcgctaacctcaacctctcatgccactccgcatccaaccccagcccgcaatattcgtggcgcattaacggaattcctcagcaacatacccaggtcctgttcattgcgaagatcacccctaacaacaacggaacctacgcctgctttgtgtcaaacctggccactggtagaaacaactccatcgtgaagtccattaccgtgtcggcgtccggaacttccccgggcctgagcgccggcgccaccgtgggaattatgatcggcgtgctcgtgggagtggccctgatctgaagatctgggccctaacaaaacaaaaagatggggttattccctaaacttcatgggttacgtaattggaagttgggggacattgccacaagatcatattgtacaaaagatcaaacactgttttagaaaacttcctgtaaacaggcctattgattggaaagtatgtcaaaggattgtgggtcttttgggctttgctgctccatttacacaatgtggatatcctgccttaatgcctttgtatgcatgtatacaagctaaacaggctttcactttctcgccaacttacaaggcctttctaagtaaacagtacatgaacctttaccccgttgctcggcaacggcctggtctgtgccaagtgtttgctgacgcaacccccactggctggggcttggccataggccatcagcgcatgcgtggaacctttgtggctcctctgccgatccatactgcggaactcctagccgcttgttttgctcgcagccggtctggagcaaagctcataggaactgacaattctgtcgtcctctcgcggaaatatacatcgtttcgatctacgtatgatctttttccctctgccaaaaattatggggacatcatgaagccccttgagcatctgacttctggctaataaaggaaatttattttcattgcaatagtgtgttggaattttttgtgtctctcactcggaaggaattctgcattaatgaatcggccaacgcgcggggagaggcggtttgcgtattgggcgctcttccgcttcctcgctcactgactcgctgcgctcggtcgttcggctgcggcgagcggtatcagctcactcaaaggcggtaatacggttatccacagaatcaggggataacgcaggaaagaacatgtgagcaaaaggccagcaaaaggccaggaaccgtaaaaaggccgcgttgctggcgtttttccataggctccgcccccctgacgagcatcacaaaaatcgacgctcaagtcagaggtggcgaaacccgacaggactataaagataccaggcgtttccccctggaagctccctcgtgcgctctcctgttccgaccctgccgcttaccggatacctgtccgcctttctcccttcgggaagcgtggcgctttctcatagctcacgctgtaggtatctcagttcggtgtaggtcgttcgctccaagctgggctgtgtgcacgaaccccccgttcagcccgaccgctgcgccttatccggtaactatcgtcttgagtccaacccggtaagacacgacttatcgccactggcagcagccactggtaacaggattagcagagcgaggtatgtaggcggtgctacagagttcttgaagtggtggcctaactacggctacactagaagaacagtatttggtatctgcgctctgctgaagccagttaccttcggaaaaagagttggtagctcttgatccggcaaacaaaccaccgctggtagcggtggtttttttgtttgcaagcagcagattacgcgcagaaaaaaaggatctcaagaagatcctttgatcttttctacggggtctgacgctcagtggaacgaaaactcacgttaagggattttggtcatgagattatcaaaaaggatcttcacctagatccttttaaattaaaaatgaagttttaaatcaatctaaagtatatatgagtaaacttggtctgacagttaccaatgcttaatcagtgaggcacctatctcagcgatctgtctatttcgttcatccatagttgcctgactc

SEQ ID NO: 70 - DNA, 6990 bp, Artificial Sequence
  Synthetic Construct
ggcgtaatgctctgccagtgttacaaccaattaaccaattctgattagaaaaactcatcgagcatcaaatgaaactgcaatttattcatatcaggattatcaataccatatttttgaaaaagccgtttctgtaatgaaggagaaaactcaccgaggcagttccataggatggcaagatcctggtatcggtctgcgattccgactcgtccaacatcaatacaacctattaatttcccctcgtcaaaaataaggttatcaagtgagaaatcaccatgagtgacgactgaatccggtgagaatggcaaaagcttatgcatttctttccagacttgttcaacaggccagccattacgctcgtcatcaaaatcactcgcatcaaccaaaccgttattcattcgtgattgcgcctgagcgagacgaaatacgcgatcgctgttaaaaggacaattacaaacaggaatcaaatgcaaccggcgcaggaacactgccagcgcatcaacaatattttcacctgaatcaggatattcttctaatacctggaatgctgttttcccggggatcgcagtggtgagtaaccatgcatcatcaggagtacggataaaatgcttgatggtcggaagaggcataaattccgtcagccagtttagtctgaccatctcatctgtaacatcattggcaacgctacctttgccatgtttcagaaacaactctggcgcatcgggcttcccatacaatcgatagattgtcgcacctgattgcccgacattatcgcgagcccatttatacccatataaatcagcatccatgttggaatttaatcgcggcctcgagcaagacgtttcccgttgaatatggctcataacaccccttgtattactgtttatgtaagcagacaggtcgacaatattggctattggccattgcatacgttgtatctatatcataatatgtacatttatattggctcatgtccaatatgaccgccatgttgacattgattattgactagttattaatagtaatcaattacggggtcattagttcatagcccatatatggagttccgcgttacataacttacggtaaatggcccgcctggctgaccgcccaacgacccccgcccattgacgtcaataatgacgtatgttcccatagtaacgccaatagggactttccattgacgtcaatgggtggagtatttacggtaaactgcccacttggcagtacatcaagtgtatcatatgccaagtccgccccctattgacgtcaatgacggtaaatggcccgcctggcattatgcccagtacatgaccttacgggactttcctacttggcagtacatctacgtattagtcatcgctattaccatggtgatgcggttttggcagtacaccaatgggcgtggatagcggtttgactcacggggatttccaagtctccaccccattgacgtcaatgggagtttgttttggcaccaaaatcaacgggactttccaaaatgtcgtaataaccccgccccgttgacgcaaatgggcggtaggcgtgtacggtgggaggtctatataagcagagctcgtttagtgaaccgtcagatcgcctggagacgccatccacgctgttttgacctccatagaagacaccgggaccgatccagcctccgcggccgggaacggtgcattggaacgcggattccccgtgccaagagtgactcaccgtccggatctcagcaagcaggtatgtactctccagggtgggcctggcttccccagtcaagactccagggatttgagggacgctgtgggctcttctcttacatgtaccttttgcttgcctcaaccctgactatcttccaggtcaggatcccagagtcaggggtctgtattttcctgctggtggctccagttcaggaacagtaaaccctgctccgaatattgcctctcacatctcgtcaatctccgcgaggactggggaccctgtgacgaacatggctagcgaatcgccaagcgcaccccctcatcggtggtgcatcccttggcaacgcctcctcctgaccgcctcactgctgactttctggaacccgccgaccaccgcaaagctgaccattgagagcactcccttcaacgtggctgaggggaaggaggtgctgctcctggtgcacaatctgccccagcacctgttcgggtactcctggtacaagggagaacgcgtggacgggaaccggcagatcataggctacgtcatcggaacccagcaggccacacccggtccagcgtacagcggccgggagattatctacccgaacgcctccctgctgatccaaaacatcatccagaacgacaccggtttctacactctgcacgtgattaagtcagatctggtcaacgaagaggccaccggccaattcagggtgtaccccgaactccctaagccgttcatcacctcgaacaacagcaacccggtcgaggatgaagatgcggtggccttgacgtgcgaacctgagatccagaacaccacctacttgtggtgggtgaacaatcagagcctgccagtctccccacgactccagctgtcgaacgacaacaggaccctgactttgctgtccgtgactcggaacgacgtgggcccttatgaatgcggtatccagaacaagctgtccgtggaccacagcgaccctgtgatcctgaacgtcctttacgggccggacgaccccaccatttccccgtcgtacacttactaccggccgggcgtgaacctgtccctgtcgtgccacgctgcctccaatccgccggcccagtactcctggctcatcgacggaaacatccagcagcacacccaagaactgttcatctccaacattaccgagaaaaactcgggactttacacctgtcaagccaacaattccgccagcggccactcccgcaccactgtcaaaactatcactgtgtccgccgaactcccgaagcccagcatcagctccaacaactcgaagcccgtggaggataaggacgctgtcgcgttcacctgtgaaccagaggcacagaataccacctacctttggtgggtcaacggacagtccctgcctgtctcaccgagactgcagctgtcaaacgggaataggactctgaccttgtttaacgtcacccggaacgacgcccgggcctacgtgtgcggcatccagaactccgtgagcgcaaaccggtctgacccagtgaccctggatgtgctgtacggccccgacactccgatcatttcaccccccgattcatcctacctgtccggcgctaacctcaacctctcatgccactccgcatccaaccccagcccgcaatattcgtggcgcattaacggaattcctcagcaacatacccaggtcctgttcattgcgaagatcacccctaacaacaacggaacctacgcctgctttgtgtcaaacctggccactggtagaaacaactccatcgtgaagtccattaccgtgtcggcgtccggaacttccccgggcctgagcgccggcgccaccgtgggaattatgatcggcgtgctcgtgggagtggccctgatcggatccggcgagggcagaggcagcctgctgacatgtggcgacgtggaagagaaccctggccccacccctggaacccagagccccttcttccttctgctgctgctgaccgtgctgactgtcgtgacaggctctggccacgccagctctacacctggcggcgagaaagagacaagcgccacccagagaagcagcgtgccaagcagcaccgagaagaacgccgtgtccatgaccagctccgtgctgagcagccactctcctggcagcggcagcagcacaacacagggccaggatgtgacactggcccctgccacagaacctgcctctggatctgccgccacctggggacaggacgtgacaagcgtgccagtgaccagacctgccctgggctctacaacaccccctgcccacgatgtgaccagcgcccctgataacaagcctgcccctggaagcacagcccctccagctcatggcgtgacctctgccccagataccagaccagccccaggatctacagccccacccgcacacggcgtgacaagtgcccctgacacaagacccgctccaggctctactgctcctcctgcccatggcgtgacaagcgctcccgatacaaggccagctcctggctccacagcaccaccagcacatggcgtgacatcagctcccgacactagacctgctcccggatcaaccgctccaccagctcacggcgtgaccagcgcacctgataccagacctgctctgggaagcaccgcccctcccgtgcacaatgtgacatctgcttccggcagcgccagcggctctgcctctacactggtgcacaacggcaccagcgccagagccacaacaaccccagccagcaagagcacccccttcagcatccctagccaccacagcgacacccctaccacactggccagccactccaccaagaccgatgcctctagcacccaccactccagcgtgccccctctgaccagcagcaaccacagcacaagcccccagctgtctaccggcgtctcattcttctttctgtccttccacatcagcaacctgcagttcaacagcagcctggaagatcccagcaccgactactaccaggaactgcagcgggatatcagcgagatgttcctgcaaatctacaagcagggcggcttcctgggcctgagcaacatcaagttcagacccggcagcgtggtggtgcagctgaccctggctttccgggaaggcaccatcaacgtgcacgacgtggaaacccagttcaaccagtacaagaccgaggccgccagccggtacaacctgaccatctccgatgtgtccgtgtccgacgtgcccttcccattctctgcccagtctggcgcaggcgtgccaggatggggaattgctctgctggtgctcgtgtgcgtgctggtggccctggccatcgtgtatctgattgccctggccgtgtgccagtgccggcggaagaattacggccagctggacatcttccccgccagagacacctaccaccccatgagcgagtaccccacataccacacccacggcagatacgtgccacccagctccaccgacagatccccctacgagaaagtgtctgccggcaacggcggcagctccctgagctacacaaatcctgccgtggccgctgcctccgccaacctgtgaagatctgggccctaacaaaacaaaaagatggggttattccctaaacttcatgggttacgtaattggaagttgggggacattgccacaagatcatattgtacaaaagatcaaacactgttttagaaaacttcctgtaaacaggcctattgattggaaagtatgtcaaaggattgtgggtcttttgggctttgctgctccatttacacaatgtggatatcctgccttaatgcctttgtatgcatgtatacaagctaaacaggctttcactttctcgccaacttacaaggcctttctaagtaaacagtacatgaacctttaccccgttgctcggcaacggcctggtctgtgccaagtgtttgctgacgcaacccccactggctggggcttggccataggccatcagcgcatgcgtggaacctttgtggctcctctgccgatccatactgcggaactcctagccgcttgttttgctcgcagccggtctggagcaaagctcataggaactgacaattctgtcgtcctctcgcggaaatatacatcgtttcgatctacgtatgatctttttccctctgccaaaaattatggggacatcatgaagccccttgagcatctgacttctggctaataaaggaaatttattttcattgcaatagtgtgttggaattttttgtgtctctcactcggaaggaattctgcattaatgaatcggccaacgcgcggggagaggcggtttgcgtattgggcgctcttccgcttcctcgctcactgactcgctgcgctcggtcgttcggctgcggcgagcggtatcagctcactcaaaggcggtaatacggttatccacagaatcaggggataacgcaggaaagaacatgtgagcaaaaggccagcaaaaggccaggaaccgtaaaaaggccgcgttgctggcgtttttccataggctccgcccccctgacgagcatcacaaaaatcgacgctcaagtcagaggtggcgaaacccgacaggactataaagataccaggcgtttccccctggaagctccctcgtgcgctctcctgttccgaccctgccgcttaccggatacctgtccgcctttctcccttcgggaagcgtggcgctttctcatagctcacgctgtaggtatctcagttcggtgtaggtcgttcgctccaagctgggctgtgtgcacgaaccccccgttcagcccgaccgctgcgccttatccggtaactatcgtcttgagtccaacccggtaagacacgacttatcgccactggcagcagccactggtaacaggattagcagagcgaggtatgtaggcggtgctacagagttcttgaagtggtggcctaactacggctacactagaagaacagtatttggtatctgcgctctgctgaagccagttaccttcggaaaaagagttggtagctcttgatccggcaaacaaaccaccgctggtagcggtggtttttttgtttgcaagcagcagattacgcgcagaaaaaaaggatctcaagaagatcctttgatcttttctacggggtctgacgctcagtggaacgaaaactcacgttaagggattttggtcatgagattatcaaaaaggatcttcacctagatccttttaaattaaaaatgaagttttaaatcaatctaaagtatatatgagtaaacttggtctgacagttaccaatgcttaatcagtgaggcacctatctcagcgatctgtctatttcgttcatccatagttgcctgactc

SEQ ID NO: 71 - DNA, 7002 bp, Artificial Sequence
  Synthetic Construct
ggcgtaatgctctgccagtgttacaaccaattaaccaattctgattagaaaaactcatcgagcatcaaatgaaactgcaatttattcatatcaggattatcaataccatatttttgaaaaagccgtttctgtaatgaaggagaaaactcaccgaggcagttccataggatggcaagatcctggtatcggtctgcgattccgactcgtccaacatcaatacaacctattaatttcccctcgtcaaaaataaggttatcaagtgagaaatcaccatgagtgacgactgaatccggtgagaatggcaaaagcttatgcatttctttccagacttgttcaacaggccagccattacgctcgtcatcaaaatcactcgcatcaaccaaaccgttattcattcgtgattgcgcctgagcgagacgaaatacgcgatcgctgttaaaaggacaattacaaacaggaatcaaatgcaaccggcgcaggaacactgccagcgcatcaacaatattttcacctgaatcaggatattcttctaatacctggaatgctgttttcccggggatcgcagtggtgagtaaccatgcatcatcaggagtacggataaaatgcttgatggtcggaagaggcataaattccgtcagccagtttagtctgaccatctcatctgtaacatcattggcaacgctacctttgccatgtttcagaaacaactctggcgcatcgggcttcccatacaatcgatagattgtcgcacctgattgcccgacattatcgcgagcccatttatacccatataaatcagcatccatgttggaatttaatcgcggcctcgagcaagacgtttcccgttgaatatggctcataacaccccttgtattactgtttatgtaagcagacaggtcgacaatattggctattggccattgcatacgttgtatctatatcataatatgtacatttatattggctcatgtccaatatgaccgccatgttgacattgattattgactagttattaatagtaatcaattacggggtcattagttcatagcccatatatggagttccgcgttacataacttacggtaaatggcccgcctggctgaccgcccaacgacccccgcccattgacgtcaataatgacgtatgttcccatagtaacgccaatagggactttccattgacgtcaatgggtggagtatttacggtaaactgcccacttggcagtacatcaagtgtatcatatgccaagtccgccccctattgacgtcaatgacggtaaatggcccgcctggcattatgcccagtacatgaccttacgggactttcctacttggcagtacatctacgtattagtcatcgctattaccatggtgatgcggttttggcagtacaccaatgggcgtggatagcggtttgactcacggggatttccaagtctccaccccattgacgtcaatgggagtttgttttggcaccaaaatcaacgggactttccaaaatgtcgtaataaccccgccccgttgacgcaaatgggcggtaggcgtgtacggtgggaggtctatataagcagagctcgtttagtgaaccgtcagatcgcctggagacgccatccacgctgttttgacctccatagaagacaccgggaccgatccagcctccgcggccgggaacggtgcattggaacgcggattccccgtgccaagagtgactcaccgtccggatctcagcaagcaggtatgtactctccagggtgggcctggcttccccagtcaagactccagggatttgagggacgctgtgggctcttctcttacatgtaccttttgcttgcctcaaccctgactatcttccaggtcaggatcccagagtcaggggtctgtattttcctgctggtggctccagttcaggaacagtaaaccctgctccgaatattgcctctcacatctcgtcaatctccgcgaggactggggaccctgtgacgaacatggctagcgaatcgccaagcgcaccccctcatcggtggtgcatcccttggcaacgcctcctcctgaccgcctcactgctgactttctggaacccgccgaccaccgcaaagctgaccattgagagcactcccttcaacgtggctgaggggaaggaggtgctgctcctggtgcacaatctgccccagcacctgttcgggtactcctggtacaagggagaacgcgtggacgggaaccggcagatcataggctacgtcatcggaacccagcaggccacacccggtccagcgtacagcggccgggagattatctacccgaacgcctccctgctgatccaaaacatcatccagaacgacaccggtttctacactctgcacgtgattaagtcagatctggtcaacgaagaggccaccggccaattcagggtgtaccccgaactccctaagccgttcatcacctcgaacaacagcaacccggtcgaggatgaagatgcggtggccttgacgtgcgaacctgagatccagaacaccacctacttgtggtgggtgaacaatcagagcctgccagtctccccacgactccagctgtcgaacgacaacaggaccctgactttgctgtccgtgactcggaacgacgtgggcccttatgaatgcggtatccagaacaagctgtccgtggaccacagcgaccctgtgatcctgaacgtcctttacgggccggacgaccccaccatttccccgtcgtacacttactaccggccgggcgtgaacctgtccctgtcgtgccacgctgcctccaatccgccggcccagtactcctggctcatcgacggaaacatccagcagcacacccaagaactgttcatctccaacattaccgagaaaaactcgggactttacacctgtcaagccaacaattccgccagcggccactcccgcaccactgtcaaaactatcactgtgtccgccgaactcccgaagcccagcatcagctccaacaactcgaagcccgtggaggataaggacgctgtcgcgttcacctgtgaaccagaggcacagaataccacctacctttggtgggtcaacggacagtccctgcctgtctcaccgagactgcagctgtcaaacgggaataggactctgaccttgtttaacgtcacccggaacgacgcccgggcctacgtgtgcggcatccagaactccgtgagcgcaaaccggtctgacccagtgaccctggatgtgctgtacggccccgacactccgatcatttcaccccccgattcatcctacctgtccggcgctaacctcaacctctcatgccactccgcatccaaccccagcccgcaatattcgtggcgcattaacggaattcctcagcaacatacccaggtcctgttcattgcgaagatcacccctaacaacaacggaacctacgcctgctttgtgtcaaacctggccactggtagaaacaactccatcgtgaagtccattaccgtgtcggcgtccggaacttccccgggcctgagcgccggcgccaccgtgggaattatgatcggcgtgctcgtgggagtggccctgatcaggaagagaagaggatccggcgagggcagaggcagcctgctgacatgtggcgacgtggaagagaaccctggccccacccctggaacccagagccccttcttccttctgctgctgctgaccgtgctgactgtcgtgacaggctctggccacgccagctctacacctggcggcgagaaagagacaagcgccacccagagaagcagcgtgccaagcagcaccgagaagaacgccgtgtccatgaccagctccgtgctgagcagccactctcctggcagcggcagcagcacaacacagggccaggatgtgacactggcccctgccacagaacctgcctctggatctgccgccacctggggacaggacgtgacaagcgtgccagtgaccagacctgccctgggctctacaacaccccctgcccacgatgtgaccagcgcccctgataacaagcctgcccctggaagcacagcccctccagctcatggcgtgacctctgccccagataccagaccagccccaggatctacagccccacccgcacacggcgtgacaagtgcccctgacacaagacccgctccaggctctactgctcctcctgcccatggcgtgacaagcgctcccgatacaaggccagctcctggctccacagcaccaccagcacatggcgtgacatcagctcccgacactagacctgctcccggatcaaccgctccaccagctcacggcgtgaccagcgcacctgataccagacctgctctgggaagcaccgcccctcccgtgcacaatgtgacatctgcttccggcagcgccagcggctctgcctctacactggtgcacaacggcaccagcgccagagccacaacaaccccagccagcaagagcacccccttcagcatccctagccaccacagcgacacccctaccacactggccagccactccaccaagaccgatgcctctagcacccaccactccagcgtgccccctctgaccagcagcaaccacagcacaagcccccagctgtctaccggcgtctcattcttctttctgtccttccacatcagcaacctgcagttcaacagcagcctggaagatcccagcaccgactactaccaggaactgcagcgggatatcagcgagatgttcctgcaaatctacaagcagggcggcttcctgggcctgagcaacatcaagttcagacccggcagcgtggtggtgcagctgaccctggctttccgggaaggcaccatcaacgtgcacgacgtggaaacccagttcaaccagtacaagaccgaggccgccagccggtacaacctgaccatctccgatgtgtccgtgtccgacgtgcccttcccattctctgcccagtctggcgcaggcgtgccaggatggggaattgctctgctggtgctcgtgtgcgtgctggtggccctggccatcgtgtatctgattgccctggccgtgtgccagtgccggcggaagaattacggccagctggacatcttccccgccagagacacctaccaccccatgagcgagtaccccacataccacacccacggcagatacgtgccacccagctccaccgacagatccccctacgagaaagtgtctgccggcaacggcggcagctccctgagctacacaaatcctgccgtggccgctgcctccgccaacctgtgaagatctgggccctaacaaaacaaaaagatggggttattccctaaacttcatgggttacgtaattggaagttgggggacattgccacaagatcatattgtacaaaagatcaaacactgttttagaaaacttcctgtaaacaggcctattgattggaaagtatgtcaaaggattgtgggtcttttgggctttgctgctccatttacacaatgtggatatcctgccttaatgcctttgtatgcatgtatacaagctaaacaggctttcactttctcgccaacttacaaggcctttctaagtaaacagtacatgaacctttaccccgttgctcggcaacggcctggtctgtgccaagtgtttgctgacgcaacccccactggctggggcttggccataggccatcagcgcatgcgtggaacctttgtggctcctctgccgatccatactgcggaactcctagccgcttgttttgctcgcagccggtctggagcaaagctcataggaactgacaattctgtcgtcctctcgcggaaatatacatcgtttcgatctacgtatgatctttttccctctgccaaaaattatggggacatcatgaagccccttgagcatctgacttctggctaataaaggaaatttattttcattgcaatagtgtgttggaattttttgtgtctctcactcggaaggaattctgcattaatgaatcggccaacgcgcggggagaggcggtttgcgtattgggcgctcttccgcttcctcgctcactgactcgctgcgctcggtcgttcggctgcggcgagcggtatcagctcactcaaaggcggtaatacggttatccacagaatcaggggataacgcaggaaagaacatgtgagcaaaaggccagcaaaaggccaggaaccgtaaaaaggccgcgttgctggcgtttttccataggctccgcccccctgacgagcatcacaaaaatcgacgctcaagtcagaggtggcgaaacccgacaggactataaagataccaggcgtttccccctggaagctccctcgtgcgctctcctgttccgaccctgccgcttaccggatacctgtccgcctttctcccttcgggaagcgtggcgctttctcatagctcacgctgtaggtatctcagttcggtgtaggtcgttcgctccaagctgggctgtgtgcacgaaccccccgttcagcccgaccgctgcgccttatccggtaactatcgtcttgagtccaacccggtaagacacgacttatcgccactggcagcagccactggtaacaggattagcagagcgaggtatgtaggcggtgctacagagttcttgaagtggtggcctaactacggctacactagaagaacagtatttggtatctgcgctctgctgaagccagttaccttcggaaaaagagttggtagctcttgatccggcaaacaaaccaccgctggtagcggtggtttttttgtttgcaagcagcagattacgcgcagaaaaaaaggatctcaagaagatcctttgatcttttctacggggtctgacgctcagtggaacgaaaactcacgttaagggattttggtcatgagattatcaaaaaggatcttcacctagatccttttaaattaaaaatgaagttttaaatcaatctaaagtatatatgagtaaacttggtctgacagttaccaatgcttaatcagtgaggcacctatctcagcgatctgtctatttcgttcatccatagttgcctgactc

SEQ ID NO: 72 - DNA, 6837 bp, Artificial Sequence
  Synthetic Construct
ggcgtaatgctctgccagtgttacaaccaattaaccaattctgattagaaaaactcatcgagcatcaaatgaaactgcaatttattcatatcaggattatcaataccatatttttgaaaaagccgtttctgtaatgaaggagaaaactcaccgaggcagttccataggatggcaagatcctggtatcggtctgcgattccgactcgtccaacatcaatacaacctattaatttcccctcgtcaaaaataaggttatcaagtgagaaatcaccatgagtgacgactgaatccggtgagaatggcaaaagcttatgcatttctttccagacttgttcaacaggccagccattacgctcgtcatcaaaatcactcgcatcaaccaaaccgttattcattcgtgattgcgcctgagcgagacgaaatacgcgatcgctgttaaaaggacaattacaaacaggaatcaaatgcaaccggcgcaggaacactgccagcgcatcaacaatattttcacctgaatcaggatattcttctaatacctggaatgctgttttcccggggatcgcagtggtgagtaaccatgcatcatcaggagtacggataaaatgcttgatggtcggaagaggcataaattccgtcagccagtttagtctgaccatctcatctgtaacatcattggcaacgctacctttgccatgtttcagaaacaactctggcgcatcgggcttcccatacaatcgatagattgtcgcacctgattgcccgacattatcgcgagcccatttatacccatataaatcagcatccatgttggaatttaatcgcggcctcgagcaagacgtttcccgttgaatatggctcataacaccccttgtattactgtttatgtaagcagacaggtcgacaatattggctattggccattgcatacgttgtatctatatcataatatgtacatttatattggctcatgtccaatatgaccgccatgttgacattgattattgactagttattaatagtaatcaattacggggtcattagttcatagcccatatatggagttccgcgttacataacttacggtaaatggcccgcctggctgaccgcccaacgacccccgcccattgacgtcaataatgacgtatgttcccatagtaacgccaatagggactttccattgacgtcaatgggtggagtatttacggtaaactgcccacttggcagtacatcaagtgtatcatatgccaagtccgccccctattgacgtcaatgacggtaaatggcccgcctggcattatgcccagtacatgaccttacgggactttcctacttggcagtacatctacgtattagtcatcgctattaccatggtgatgcggttttggcagtacaccaatgggcgtggatagcggtttgactcacggggatttccaagtctccaccccattgacgtcaatgggagtttgttttggcaccaaaatcaacgggactttccaaaatgtcgtaataaccccgccccgttgacgcaaatgggcggtaggcgtgtacggtgggaggtctatataagcagagctcgtttagtgaaccgtcagatcgcctggagacgccatccacgctgttttgacctccatagaagacaccgggaccgatccagcctccgcggccgggaacggtgcattggaacgcggattccccgtgccaagagtgactcaccgtccggatctcagcaagcaggtatgtactctccagggtgggcctggcttccccagtcaagactccagggatttgagggacgctgtgggctcttctcttacatgtaccttttgcttgcctcaaccctgactatcttccaggtcaggatcccagagtcaggggtctgtattttcctgctggtggctccagttcaggaacagtaaaccctgctccgaatattgcctctcacatctcgtcaatctccgcgaggactggggaccctgtgacgaacatggctagcacccctggaacccagagccccttcttccttctgctgctgctgaccgtgctgactgtcgtgacaggctctggccacgccagctctacacctggcggcgagaaagagacaagcgccacccagagaagcagcgtgccaagcagcaccgagaagaacgccgtgtccatgaccagctccgtgctgagcagccactctcctggcagcggcagcagcacaacacagggccaggatgtgacactggcccctgccacagaacctgcctctggatctgccgccacctggggacaggacgtgacaagcgtgccagtgaccagacctgccctgggctctacaacaccccctgcccacgatgtgaccagcgcccctgataacaagcctgcccctggaagcacagcccctccagctcatggcgtgacctctgccccagataccagaccagccccaggatctacagccccacccgcacacggcgtgacaagtgcccctgacacaagacccgctccaggctctactgctcctcctgcccatggcgtgacaagcgctcccgatacaaggccagctcctggctccacagcaccaccagcacatggcgtgacatcagctcccgacactagacctgctcccggatcaaccgctccaccagctcacggcgtgaccagcgcacctgataccagacctgctctgggaagcaccgcccctcccgtgcacaatgtgacatctgcttccggcagcgccagcggctctgcctctacactggtgcacaacggcaccagcgccagagccacaacaaccccagccagcaagagcacccccttcagcatccctagccaccacagcgacacccctaccacactggccagccactccaccaagaccgatgcctctagcacccaccactccagcgtgccccctctgaccagcagcaaccacagcacaagcccccagctgtctaccggcgtctcattcttctttctgtccttccacatcagcaacctgcagttcaacagcagcctggaagatcccagcaccgactactaccaggaactgcagcgggatatcagcgagatgttcctgcaaatctacaagcagggcggcttcctgggcctgagcaacatcaagttcagacccggcagcgtggtggtgcagctgaccctggctttccgggaaggcaccatcaacgtgcacgacgtggaaacccagttcaaccagtacaagaccgaggccgccagccggtacaacctgaccatctccgatgtgtccgtgtccgacgtgcccttcccattctctgcccagtctggcgcaggcgtgccaggatggggaattgctctgctggtgctcgtgtgcgtgctggtggccctggccatcgtgtatctgattgccctggccgtgtgccagtgccggcggaagaattacggccagctggacatcttccccgccagagacacctaccaccccatgagcgagtaccccacataccacacccacggcagatacgtgccacccagctccaccgacagatccccctacgagaaagtgtctgccggcaacggcggcagctccctgagctacacaaatcctgccgtggccgctgcctccgccaacctgggatccggcagaatcttcaacgcccactacgccggctacttcgccgacctgctgatccacgacatcgagacaaaccctggccccaagctgaccattgagagcactcccttcaacgtggctgaggggaaggaggtgctgctcctggtgcacaatctgccccagcacctgttcgggtactcctggtacaagggagaacgcgtggacgggaaccggcagatcataggctacgtcatcggaacccagcaggccacacccggtccagcgtacagcggccgggagattatctacccgaacgcctccctgctgatccaaaacatcatccagaacgacaccggtttctacactctgcacgtgattaagtcagatctggtcaacgaagaggccaccggccaattcagggtgtaccccgaactccctaagccgttcatcacctcgaacaacagcaacccggtcgaggatgaagatgcggtggccttgacgtgcgaacctgagatccagaacaccacctacttgtggtgggtgaacaatcagagcctgccagtctccccacgactccagctgtcgaacgacaacaggaccctgactttgctgtccgtgactcggaacgacgtgggcccttatgaatgcggtatccagaacaagctgtccgtggaccacagcgaccctgtgatcctgaacgtcctttacgggccggacgaccccaccatttccccgtcgtacacttactaccggccgggcgtgaacctgtccctgtcgtgccacgctgcctccaatccgccggcccagtactcctggctcatcgacggaaacatccagcagcacacccaagaactgttcatctccaacattaccgagaaaaactcgggactttacacctgtcaagccaacaattccgccagcggccactcccgcaccactgtcaaaactatcactgtgtccgccgaactcccgaagcccagcatcagctccaacaactcgaagcccgtggaggataaggacgctgtcgcgttcacctgtgaaccagaggcacagaataccacctacctttggtgggtcaacggacagtccctgcctgtctcaccgagactgcagctgtcaaacgggaataggactctgaccttgtttaacgtcacccggaacgacgcccgggcctacgtgtgcggcatccagaactccgtgagcgcaaaccggtctgacccagtgaccctggatgtgctgtacggccccgacactccgatcatttcaccccccgattcatcctacctgtccggcgctaacctcaacctctcatgccactccgcatccaaccccagcccgcaatattcgtggcgcattaacggaattcctcagcaacatacccaggtcctgttcattgcgaagatcacccctaacaacaacggaacctacgcctgctttgtgtcaaacctggccactggtagaaacaactccatcgtgaagtccattaccgtgtcggcgtcctgaagatctgggccctaacaaaacaaaaagatggggttattccctaaacttcatgggttacgtaattggaagttgggggacattgccacaagatcatattgtacaaaagatcaaacactgttttagaaaacttcctgtaaacaggcctattgattggaaagtatgtcaaaggattgtgggtcttttgggctttgctgctccatttacacaatgtggatatcctgccttaatgcctttgtatgcatgtatacaagctaaacaggctttcactttctcgccaacttacaaggcctttctaagtaaacagtacatgaacctttaccccgttgctcggcaacggcctggtctgtgccaagtgtttgctgacgcaacccccactggctggggcttggccataggccatcagcgcatgcgtggaacctttgtggctcctctgccgatccatactgcggaactcctagccgcttgttttgctcgcagccggtctggagcaaagctcataggaactgacaattctgtcgtcctctcgcggaaatatacatcgtttcgatctacgtatgatctttttccctctgccaaaaattatggggacatcatgaagccccttgagcatctgacttctggctaataaaggaaatttattttcattgcaatagtgtgttggaattttttgtgtctctcactcggaaggaattctgcattaatgaatcggccaacgcgcggggagaggcggtttgcgtattgggcgctcttccgcttcctcgctcactgactcgctgcgctcggtcgttcggctgcggcgagcggtatcagctcactcaaaggcggtaatacggttatccacagaatcaggggataacgcaggaaagaacatgtgagcaaaaggccagcaaaaggccaggaaccgtaaaaaggccgcgttgctggcgtttttccataggctccgcccccctgacgagcatcacaaaaatcgacgctcaagtcagaggtggcgaaacccgacaggactataaagataccaggcgtttccccctggaagctccctcgtgcgctctcctgttccgaccctgccgcttaccggatacctgtccgcctttctcccttcgggaagcgtggcgctttctcatagctcacgctgtaggtatctcagttcggtgtaggtcgttcgctccaagctgggctgtgtgcacgaaccccccgttcagcccgaccgctgcgccttatccggtaactatcgtcttgagtccaacccggtaagacacgacttatcgccactggcagcagccactggtaacaggattagcagagcgaggtatgtaggcggtgctacagagttcttgaagtggtggcctaactacggctacactagaagaacagtatttggtatctgcgctctgctgaagccagttaccttcggaaaaagagttggtagctcttgatccggcaaacaaaccaccgctggtagcggtggtttttttgtttgcaagcagcagattacgcgcagaaaaaaaggatctcaagaagatcctttgatcttttctacggggtctgacgctcagtggaacgaaaactcacgttaagggattttggtcatgagattatcaaaaaggatcttcacctagatccttttaaattaaaaatgaagttttaaatcaatctaaagtatatatgagtaaacttggtctgacagttaccaatgcttaatcagtgaggcacctatctcagcgatctgtctatttcgttcatccatagttgcctgactc

SEQ ID NO: 73 - DNA, 7890 bp, Artificial Sequence
  Synthetic Construct
ggcgtaatgctctgccagtgttacaaccaattaaccaattctgattagaaaaactcatcgagcatcaaatgaaactgcaatttattcatatcaggattatcaataccatatttttgaaaaagccgtttctgtaatgaaggagaaaactcaccgaggcagttccataggatggcaagatcctggtatcggtctgcgattccgactcgtccaacatcaatacaacctattaatttcccctcgtcaaaaataaggttatcaagtgagaaatcaccatgagtgacgactgaatccggtgagaatggcaaaagcttatgcatttctttccagacttgttcaacaggccagccattacgctcgtcatcaaaatcactcgcatcaaccaaaccgttattcattcgtgattgcgcctgagcgagacgaaatacgcgatcgctgttaaaaggacaattacaaacaggaatcaaatgcaaccggcgcaggaacactgccagcgcatcaacaatattttcacctgaatcaggatattcttctaatacctggaatgctgttttcccggggatcgcagtggtgagtaaccatgcatcatcaggagtacggataaaatgcttgatggtcggaagaggcataaattccgtcagccagtttagtctgaccatctcatctgtaacatcattggcaacgctacctttgccatgtttcagaaacaactctggcgcatcgggcttcccatacaatcgatagattgtcgcacctgattgcccgacattatcgcgagcccatttatacccatataaatcagcatccatgttggaatttaatcgcggcctcgagcaagacgtttcccgttgaatatggctcataacaccccttgtattactgtttatgtaagcagacaggtcgacaatattggctattggccattgcatacgttgtatctatatcataatatgtacatttatattggctcatgtccaatatgaccgccatgttgacattgattattgactagttattaatagtaatcaattacggggtcattagttcatagcccatatatggagttccgcgttacataacttacggtaaatggcccgcctggctgaccgcccaacgacccccgcccattgacgtcaataatgacgtatgttcccatagtaacgccaatagggactttccattgacgtcaatgggtggagtatttacggtaaactgcccacttggcagtacatcaagtgtatcatatgccaagtccgccccctattgacgtcaatgacggtaaatggcccgcctggcattatgcccagtacatgaccttacgggactttcctacttggcagtacatctacgtattagtcatcgctattaccatggtgatgcggttttggcagtacaccaatgggcgtggatagcggtttgactcacggggatttccaagtctccaccccattgacgtcaatgggagtttgttttggcaccaaaatcaacgggactttccaaaatgtcgtaataaccccgccccgttgacgcaaatgggcggtaggcgtgtacggtgggaggtctatataagcagagctcgtttagtgaaccgtcagatcgcctggagacgccatccacgctgttttgacctccatagaagacaccgggaccgatccagcctccgcggccgggaacggtgcattggaacgcggattccccgtgccaagagtgactcaccgtccggatctcagcaagcaggtatgtactctccagggtgggcctggcttccccagtcaagactccagggatttgagggacgctgtgggctcttctcttacatgtaccttttgcttgcctcaaccctgactatcttccaggtcaggatcccagagtcaggggtctgtattttcctgctggtggctccagttcaggaacagtaaaccctgctccgaatattgcctctcacatctcgtcaatctccgcgaggactggggaccctgtgacgaacatggctagcaagctgaccattgagagcactcccttcaacgtggctgaggggaaggaggtgctgctcctggtgcacaatctgccccagcacctgttcgggtactcctggtacaagggagaacgcgtggacgggaaccggcagatcataggctacgtcatcggaacccagcaggccacacccggtccagcgtacagcggccgggagattatctacccgaacgcctccctgctgatccaaaacatcatccagaacgacaccggtttctacactctgcacgtgattaagtcagatctggtcaacgaagaggccaccggccaattcagggtgtaccccgaactccctaagccgttcatcacctcgaacaacagcaacccggtcgaggatgaagatgcggtggccttgacgtgcgaacctgagatccagaacaccacctacttgtggtgggtgaacaatcagagcctgccagtctccccacgactccagctgtcgaacgacaacaggaccctgactttgctgtccgtgactcggaacgacgtgggcccttatgaatgcggtatccagaacaagctgtccgtggaccacagcgaccctgtgatcctgaacgtcctttacgggccggacgaccccaccatttccccgtcgtacacttactaccggccgggcgtgaacctgtccctgtcgtgccacgctgcctccaatccgccggcccagtactcctggctcatcgacggaaacatccagcagcacacccaagaactgttcatctccaacattaccgagaaaaactcgggactttacacctgtcaagccaacaattccgccagcggccactcccgcaccactgtcaaaactatcactgtgtccgccgaactcccgaagcccagcatcagctccaacaactcgaagcccgtggaggataaggacgctgtcgcgttcacctgtgaaccagaggcacagaataccacctacctttggtgggtcaacggacagtccctgcctgtctcaccgagactgcagctgtcaaacgggaataggactctgaccttgtttaacgtcacccggaacgacgcccgggcctacgtgtgcggcatccagaactccgtgagcgcaaaccggtctgacccagtgaccctggatgtgctgtacggccccgacactccgatcatttcaccccccgattcatcctacctgtccggcgctaacctcaacctctcatgccactccgcatccaaccccagcccgcaatattcgtggcgcattaacggaattcctcagcaacatacccaggtcctgttcattgcgaagatcacccctaacaacaacggaacctacgcctgctttgtgtcaaacctggccactggtagaaacaactccatcgtgaagtccattaccgtgtcggcgtccggatccggcgagggcagaggcagcctgctgacatgtggcgacgtggaagagaaccctggccccggagctgccccggagccggagaggacccccgttggccagggatcgtgggcccatccgggacgcaccaggggaccatccgacaggggattctgtgtggtgtcaccggccaggccagcagaagaggcaaccagcctcgagggagcgttgtctggaaccagacattcccacccgtcggtgggccggcagcaccacgcgggaccaccgtccacttccagaccgccacggccatgggacaccccttgcccgcctgtgtatgccgagactaaacacttcctgtactcatccggagacaaggaacagcttcggccgtccttcctcctgtcgtcgctcagaccgagcctgaccggagcacgcagattggtggaaactatcttccttgggtcacgtccgtggatgccaggtaccccacggcgcctcccgcgcctcccacagagatactggcagatgcggcctctgttcctggaattgctgggaaaccacgctcagtgcccgtacggagtcctgctcaagactcactgccctctgagggcggcggtcactccggcggccggagtgtgcgcacgggagaagccccagggaagcgtggcagctccggaagaggaggacaccgatccgcgccgcctcgtgcaacttctgcgccagcactcctcgccctggcaagtctacgggttcgtccgcgcctgcctgcgccgcctggtgccgcctgggctctggggttcccggcataacgagcgccgcttcctgagaaatactaagaagtttatctcacttggaaaacatgccaagttgtcgctgcaagaactcacgtggaagatgtcagtccgcgattgcgcctggctgcgccgctcgccgggcgtcgggtgtgttccagctgcagaacaccgcctgagagaagaaattctggccaaatttctgcattggctgatgtcagtgtacgtggtcgagctgctgcgctcctttttctacgtcactgagactacctttcaaaagaaccgcctgttcttctaccgcaaatctgtgtggagcaagctgcagtcaatcggcattcgccagcatctgaagagggtgcagctgcgggaactttccgaggcagaagtccgccagcaccgggaggcccggccggcgcttctcacgtcgcgtctgagattcatcccaaagcccgacgggctgaggcctatcgtcaacatggattacgtcgtgggcgctcgcacctttcgccgtgaaaagcgggccgaacgcttgacctcacgggtgaaggccctcttctccgtgctgaactacgagagagcaagacggcctggcctgctgggagcttcggtgctgggactggacgatatccaccgggcttggcggacctttgttctccgggtgagagcccaagaccctccgccggaactgtacttcgtgaaggtggcgatcaccggagcctatgatactattccgcaagatcgactcaccgaagtcatcgcctcgatcatcaaaccgcagaacacttactgcgtcaggcggtacgccgtggtccagaaggccgcgcatggccacgtgagaaaggcgttcaagtcgcacgtgtccactctcaccgacctccagccttacatgaggcaattcgttgcgcatttgcaagagacttcgcccctgagagatgcggtggtcatcgagcagagctccagcctgaacgaagcgagcagcggtctgtttgacgtgttcctccgcttcatgtgtcatcacgcggtgcgaatcaggggaaaatcatacgtgcagtgccagggaatcccacaaggcagcattctgtcgactctcttgtgttccctttgctacggcgatatggaaaacaagctgttcgctgggatcagacgggacgggttgctgctcagactggtggacgacttcctgctggtgactccgcacctcactcacgccaaaacctttctccgcactctggtgaggggagtgccagaatacggctgtgtggtcaatctccggaaaactgtggtgaatttccctgtcgaggatgaggcactcggaggaaccgcatttgtccaaatgccagcacatggcctgttcccatggtgcggtctgctgctggacacccgaactcttgaagtgcagtccgactactccagctatgcccggacgagcatccgcgccagcctcactttcaatcgcggctttaaggccggacgaaacatgcgcagaaagcttttcggagtcctccggcttaaatgccattcgctctttctcgatctccaagtcaattcgctgcagaccgtgtgcacgaacatctacaagatcctgctgctccaagcctaccggttccacgcttgcgtgcttcagctgccgtttcaccaacaggtgtggaagaacccgaccttctttctgcgggtcattagcgatactgcctccctgtgttactcaatcctcaaggcaaagaacgccggaatgtcgctgggtgcgaaaggagccgcgggacctcttcctagcgaagcggtgcagtggctctgccaccaggctttcctcctgaagctgaccaggcacagagtgacctacgtcccgctgctgggctcgctgcgcactgcacagacccagctgtctagaaaactccccggcaccaccctgaccgctctggaagccgccgccaacccagcattgccgtcagatttcaagaccatcttggactgaagatctgggccctaacaaaacaaaaagatggggttattccctaaacttcatgggttacgtaattggaagttgggggacattgccacaagatcatattgtacaaaagatcaaacactgttttagaaaacttcctgtaaacaggcctattgattggaaagtatgtcaaaggattgtgggtcttttgggctttgctgctccatttacacaatgtggatatcctgccttaatgcctttgtatgcatgtatacaagctaaacaggctttcactttctcgccaacttacaaggcctttctaagtaaacagtacatgaacctttaccccgttgctcggcaacggcctggtctgtgccaagtgtttgctgacgcaacccccactggctggggcttggccataggccatcagcgcatgcgtggaacctttgtggctcctctgccgatccatactgcggaactcctagccgcttgttttgctcgcagccggtctggagcaaagctcataggaactgacaattctgtcgtcctctcgcggaaatatacatcgtttcgatctacgtatgatctttttccctctgccaaaaattatggggacatcatgaagccccttgagcatctgacttctggctaataaaggaaatttattttcattgcaatagtgtgttggaattttttgtgtctctcactcggaaggaattctgcattaatgaatcggccaacgcgcggggagaggcggtttgcgtattgggcgctcttccgcttcctcgctcactgactcgctgcgctcggtcgttcggctgcggcgagcggtatcagctcactcaaaggcggtaatacggttatccacagaatcaggggataacgcaggaaagaacatgtgagcaaaaggccagcaaaaggccaggaaccgtaaaaaggccgcgttgctggcgtttttccataggctccgcccccctgacgagcatcacaaaaatcgacgctcaagtcagaggtggcgaaacccgacaggactataaagataccaggcgtttccccctggaagctccctcgtgcgctctcctgttccgaccctgccgcttaccggatacctgtccgcctttctcccttcgggaagcgtggcgctttctcatagctcacgctgtaggtatctcagttcggtgtaggtcgttcgctccaagctgggctgtgtgcacgaaccccccgttcagcccgaccgctgcgccttatccggtaactatcgtcttgagtccaacccggtaagacacgacttatcgccactggcagcagccactggtaacaggattagcagagcgaggtatgtaggcggtgctacagagttcttgaagtggtggcctaactacggctacactagaagaacagtatttggtatctgcgctctgctgaagccagttaccttcggaaaaagagttggtagctcttgatccggcaaacaaaccaccgctggtagcggtggtttttttgtttgcaagcagcagattacgcgcagaaaaaaaggatctcaagaagatcctttgatcttttctacggggtctgacgctcagtggaacgaaaactcacgttaagggattttggtcatgagattatcaaaaaggatcttcacctagatccttttaaattaaaaatgaagttttaaatcaatctaaagtatatatgagtaaacttggtctgacagttaccaatgcttaatcagtgaggcacctatctcagcgatctgtctatttcgttcatccatagttgcctgactc

SEQ ID NO: 74 - DNA, 8070 bp, Artificial Sequence
  Synthetic Construct
ggcgtaatgctctgccagtgttacaaccaattaaccaattctgattagaaaaactcatcgagcatcaaatgaaactgcaatttattcatatcaggattatcaataccatatttttgaaaaagccgtttctgtaatgaaggagaaaactcaccgaggcagttccataggatggcaagatcctggtatcggtctgcgattccgactcgtccaacatcaatacaacctattaatttcccctcgtcaaaaataaggttatcaagtgagaaatcaccatgagtgacgactgaatccggtgagaatggcaaaagcttatgcatttctttccagacttgttcaacaggccagccattacgctcgtcatcaaaatcactcgcatcaaccaaaccgttattcattcgtgattgcgcctgagcgagacgaaatacgcgatcgctgttaaaaggacaattacaaacaggaatcaaatgcaaccggcgcaggaacactgccagcgcatcaacaatattttcacctgaatcaggatattcttctaatacctggaatgctgttttcccggggatcgcagtggtgagtaaccatgcatcatcaggagtacggataaaatgcttgatggtcggaagaggcataaattccgtcagccagtttagtctgaccatctcatctgtaacatcattggcaacgctacctttgccatgtttcagaaacaactctggcgcatcgggcttcccatacaatcgatagattgtcgcacctgattgcccgacattatcgcgagcccatttatacccatataaatcagcatccatgttggaatttaatcgcggcctcgagcaagacgtttcccgttgaatatggctcataacaccccttgtattactgtttatgtaagcagacaggtcgacaatattggctattggccattgcatacgttgtatctatatcataatatgtacatttatattggctcatgtccaatatgaccgccatgttgacattgattattgactagttattaatagtaatcaattacggggtcattagttcatagcccatatatggagttccgcgttacataacttacggtaaatggcccgcctggctgaccgcccaacgacccccgcccattgacgtcaataatgacgtatgttcccatagtaacgccaatagggactttccattgacgtcaatgggtggagtatttacggtaaactgcccacttggcagtacatcaagtgtatcatatgccaagtccgccccctattgacgtcaatgacggtaaatggcccgcctggcattatgcccagtacatgaccttacgggactttcctacttggcagtacatctacgtattagtcatcgctattaccatggtgatgcggttttggcagtacaccaatgggcgtggatagcggtttgactcacggggatttccaagtctccaccccattgacgtcaatgggagtttgttttggcaccaaaatcaacgggactttccaaaatgtcgtaataaccccgccccgttgacgcaaatgggcggtaggcgtgtacggtgggaggtctatataagcagagctcgtttagtgaaccgtcagatcgcctggagacgccatccacgctgttttgacctccatagaagacaccgggaccgatccagcctccgcggccgggaacggtgcattggaacgcggattccccgtgccaagagtgactcaccgtccggatctcagcaagcaggtatgtactctccagggtgggcctggcttccccagtcaagactccagggatttgagggacgctgtgggctcttctcttacatgtaccttttgcttgcctcaaccctgactatcttccaggtcaggatcccagagtcaggggtctgtattttcctgctggtggctccagttcaggaacagtaaaccctgctccgaatattgcctctcacatctcgtcaatctccgcgaggactggggaccctgtgacgaacatggctagcggagctgccccggagccggagaggacccccgttggccagggatcgtgggcccatccgggacgcaccaggggaccatccgacaggggattctgtgtggtgtcaccggccaggccagcagaagaggcaaccagcctcgagggagcgttgtctggaaccagacattcccacccgtcggtgggccggcagcaccacgcgggaccaccgtccacttccagaccgccacggccatgggacaccccttgcccgcctgtgtatgccgagactaaacacttcctgtactcatccggagacaaggaacagcttcggccgtccttcctcctgtcgtcgctcagaccgagcctgaccggagcacgcagattggtggaaactatcttccttgggtcacgtccgtggatgccaggtaccccacggcgcctcccgcgcctcccacagagatactggcagatgcggcctctgttcctggaattgctgggaaaccacgctcagtgcccgtacggagtcctgctcaagactcactgccctctgagggcggcggtcactccggcggccggagtgtgcgcacgggagaagccccagggaagcgtggcagctccggaagaggaggacaccgatccgcgccgcctcgtgcaacttctgcgccagcactcctcgccctggcaagtctacgggttcgtccgcgcctgcctgcgccgcctggtgccgcctgggctctggggttcccggcataacgagcgccgcttcctgagaaatactaagaagtttatctcacttggaaaacatgccaagttgtcgctgcaagaactcacgtggaagatgtcagtccgcgattgcgcctggctgcgccgctcgccgggcgtcgggtgtgttccagctgcagaacaccgcctgagagaagaaattctggccaaatttctgcattggctgatgtcagtgtacgtggtcgagctgctgcgctcctttttctacgtcactgagactacctttcaaaagaaccgcctgttcttctaccgcaaatctgtgtggagcaagctgcagtcaatcggcattcgccagcatctgaagagggtgcagctgcgggaactttccgaggcagaagtccgccagcaccgggaggcccggccggcgcttctcacgtcgcgtctgagattcatcccaaagcccgacgggctgaggcctatcgtcaacatggattacgtcgtgggcgctcgcacctttcgccgtgaaaagcgggccgaacgcttgacctcacgggtgaaggccctcttctccgtgctgaactacgagagagcaagacggcctggcctgctgggagcttcggtgctgggactggacgatatccaccgggcttggcggacctttgttctccgggtgagagcccaagaccctccgccggaactgtacttcgtgaaggtggcgatcaccggagcctatgatactattccgcaagatcgactcaccgaagtcatcgcctcgatcatcaaaccgcagaacacttactgcgtcaggcggtacgccgtggtccagaaggccgcgcatggccacgtgagaaaggcgttcaagtcgcacgtgtccactctcaccgacctccagccttacatgaggcaattcgttgcgcatttgcaagagacttcgcccctgagagatgcggtggtcatcgagcagagctccagcctgaacgaagcgagcagcggtctgtttgacgtgttcctccgcttcatgtgtcatcacgcggtgcgaatcaggggaaaatcatacgtgcagtgccagggaatcccacaaggcagcattctgtcgactctcttgtgttccctttgctacggcgatatggaaaacaagctgttcgctgggatcagacgggacgggttgctgctcagactggtggacgacttcctgctggtgactccgcacctcactcacgccaaaacctttctccgcactctggtgaggggagtgccagaatacggctgtgtggtcaatctccggaaaactgtggtgaatttccctgtcgaggatgaggcactcggaggaaccgcatttgtccaaatgccagcacatggcctgttcccatggtgcggtctgctgctggacacccgaactcttgaagtgcagtccgactactccagctatgcccggacgagcatccgcgccagcctcactttcaatcgcggctttaaggccggacgaaacatgcgcagaaagcttttcggagtcctccggcttaaatgccattcgctctttctcgatctccaagtcaattcgctgcagaccgtgtgcacgaacatctacaagatcctgctgctccaagcctaccggttccacgcttgcgtgcttcagctgccgtttcaccaacaggtgtggaagaacccgaccttctttctgcgggtcattagcgatactgcctccctgtgttactcaatcctcaaggcaaagaacgccggaatgtcgctgggtgcgaaaggagccgcgggacctcttcctagcgaagcggtgcagtggctctgccaccaggctttcctcctgaagctgaccaggcacagagtgacctacgtcccgctgctgggctcgctgcgcactgcacagacccagctgtctagaaaactccccggcaccaccctgaccgctctggaagccgccgccaacccagcattgccgtcagatttcaagaccatcttggacggatccggccagtgcaccaattacgccctgctgaagctggccggcgacgtggaatctaaccctggccctgaatcgccaagcgcaccccctcatcggtggtgcatcccttggcaacgcctcctcctgaccgcctcactgctgactttctggaacccgccgaccaccgcaaagctgaccattgagagcactcccttcaacgtggctgaggggaaggaggtgctgctcctggtgcacaatctgccccagcacctgttcgggtactcctggtacaagggagaacgcgtggacgggaaccggcagatcataggctacgtcatcggaacccagcaggccacacccggtccagcgtacagcggccgggagattatctacccgaacgcctccctgctgatccaaaacatcatccagaacgacaccggtttctacactctgcacgtgattaagtcagatctggtcaacgaagaggccaccggccaattcagggtgtaccccgaactccctaagccgttcatcacctcgaacaacagcaacccggtcgaggatgaagatgcggtggccttgacgtgcgaacctgagatccagaacaccacctacttgtggtgggtgaacaatcagagcctgccagtctccccacgactccagctgtcgaacgacaacaggaccctgactttgctgtccgtgactcggaacgacgtgggcccttatgaatgcggtatccagaacaagctgtccgtggaccacagcgaccctgtgatcctgaacgtcctttacgggccggacgaccccaccatttccccgtcgtacacttactaccggccgggcgtgaacctgtccctgtcgtgccacgctgcctccaatccgccggcccagtactcctggctcatcgacggaaacatccagcagcacacccaagaactgttcatctccaacattaccgagaaaaactcgggactttacacctgtcaagccaacaattccgccagcggccactcccgcaccactgtcaaaactatcactgtgtccgccgaactcccgaagcccagcatcagctccaacaactcgaagcccgtggaggataaggacgctgtcgcgttcacctgtgaaccagaggcacagaataccacctacctttggtgggtcaacggacagtccctgcctgtctcaccgagactgcagctgtcaaacgggaataggactctgaccttgtttaacgtcacccggaacgacgcccgggcctacgtgtgcggcatccagaactccgtgagcgcaaaccggtctgacccagtgaccctggatgtgctgtacggccccgacactccgatcatttcaccccccgattcatcctacctgtccggcgctaacctcaacctctcatgccactccgcatccaaccccagcccgcaatattcgtggcgcattaacggaattcctcagcaacatacccaggtcctgttcattgcgaagatcacccctaacaacaacggaacctacgcctgctttgtgtcaaacctggccactggtagaaacaactccatcgtgaagtccattaccgtgtcggcgtccggaacttccccgggcctgagcgccggcgccaccgtgggaattatgatcggcgtgctcgtgggagtggccctgatctgaagatctgggccctaacaaaacaaaaagatggggttattccctaaacttcatgggttacgtaattggaagttgggggacattgccacaagatcatattgtacaaaagatcaaacactgttttagaaaacttcctgtaaacaggcctattgattggaaagtatgtcaaaggattgtgggtcttttgggctttgctgctccatttacacaatgtggatatcctgccttaatgcctttgtatgcatgtatacaagctaaacaggctttcactttctcgccaacttacaaggcctttctaagtaaacagtacatgaacctttaccccgttgctcggcaacggcctggtctgtgccaagtgtttgctgacgcaacccccactggctggggcttggccataggccatcagcgcatgcgtggaacctttgtggctcctctgccgatccatactgcggaactcctagccgcttgttttgctcgcagccggtctggagcaaagctcataggaactgacaattctgtcgtcctctcgcggaaatatacatcgtttcgatctacgtatgatctttttccctctgccaaaaattatggggacatcatgaagccccttgagcatctgacttctggctaataaaggaaatttattttcattgcaatagtgtgttggaattttttgtgtctctcactcggaaggaattctgcattaatgaatcggccaacgcgcggggagaggcggtttgcgtattgggcgctcttccgcttcctcgctcactgactcgctgcgctcggtcgttcggctgcggcgagcggtatcagctcactcaaaggcggtaatacggttatccacagaatcaggggataacgcaggaaagaacatgtgagcaaaaggccagcaaaaggccaggaaccgtaaaaaggccgcgttgctggcgtttttccataggctccgcccccctgacgagcatcacaaaaatcgacgctcaagtcagaggtggcgaaacccgacaggactataaagataccaggcgtttccccctggaagctccctcgtgcgctctcctgttccgaccctgccgcttaccggatacctgtccgcctttctcccttcgggaagcgtggcgctttctcatagctcacgctgtaggtatctcagttcggtgtaggtcgttcgctccaagctgggctgtgtgcacgaaccccccgttcagcccgaccgctgcgccttatccggtaactatcgtcttgagtccaacccggtaagacacgacttatcgccactggcagcagccactggtaacaggattagcagagcgaggtatgtaggcggtgctacagagttcttgaagtggtggcctaactacggctacactagaagaacagtatttggtatctgcgctctgctgaagccagttaccttcggaaaaagagttggtagctcttgatccggcaaacaaaccaccgctggtagcggtggtttttttgtttgcaagcagcagattacgcgcagaaaaaaaggatctcaagaagatcctttgatcttttctacggggtctgacgctcagtggaacgaaaactcacgttaagggattttggtcatgagattatcaaaaaggatcttcacctagatccttttaaattaaaaatgaagttttaaatcaatctaaagtatatatgagtaaacttggtctgacagttaccaatgcttaatcagtgaggcacctatctcagcgatctgtctatttcgttcatccatagttgcctgactc

SEQ ID NO: 75 - DNA, 30252 bp, Artificial Sequence
  Synthetic Construct
ccatcttcaataatatacctcaaactttttgtgcgcgttaatatgcaaatgaggcgtttgaatttggggaggaagggcggtgattggtcgagggatgagcgaccgttaggggcggggcgagtgacgttttgatgacgtggttgcgaggaggagccagtttgcaagttctcgtgggaaaagtgacgtcaaacgaggtgtggtttgaacacggaaatactcaattttcccgcgctctctgacaggaaatgaggtgtttctgggcggatgcaagtgaaaacgggccattttcgcgcgaaaactgaatgaggaagtgaaaatctgagtaatttcgcgtttatggcagggaggagtatttgccgagggccgagtagactttgaccgattacgtgggggtttcgattaccgtgtttttcacctaaatttccgcgtacggtgtcaaagtccggtgtttttactactgtaatagtaatcaattacggggtcattagttcatagcccatatatggagttccgcgttacataacttacggtaaatggcccgcctggctgaccgcccaacgacccccgcccattgacgtcaataatgacgtatgttcccatagtaacgccaatagggactttccattgacgtcaatgggtggagtatttacggtaaactgcccacttggcagtacatcaagtgtatcatatgccaagtacgccccctattgacgtcaatgacggtaaatggcccgcctggcattatgcccagtacatgaccttatgggactttcctacttggcagtacatctacgtattagtcatcgctattaccatggtgatgcggttttggcagtacatcaatgggcgtggatagcggtttgactcacggggatttccaagtctccaccccattgacgtcaatgggagtttgttttggcaccaaaatcaacgggactttccaaaatgtcgtaacaactccgccccattgacgcaaatgggcggtaggcgtgtacggtgggaggtctatataagcagagctgtccctatcagtgatagagatctccctatcagtgatagagagtttagtgaaccgtcagatccgctagggtaccgcgatcgcacctcgagctgatcataatcagccataccacatttgtagaggttttacttgctttaaaaaacctcccacacctccccctgaacctgaaacataaaatgaatgcaattgttgttgttaacttgtttattgcagcttataatggttacaaataaagcaatagcatcacaaatttcacaaataaagcatttttttcactgcattctagttgtggtttgtccaaactcatcaatgtatcttaccaggtgccgagcctgcgagtgcggagggaagcatgccaggttccagcccgtgtgtgtggatgtgacggaggacctgcgacccgatcatttggtgttgccctgcaccgggacggagttcggttccagcggggaagaatctgactagagtgagtagtgttctggggcgggggaggacctgcatgagggccagaataactgaaatctgtgcttttctgtgtgttgcagcagcatgagcggaagcggctcctttgagggaggggtattcagcccttatctgacggggcgtctcccctcctgggcgggagtgcgtcagaatgtgatgggatccacggtggacggccggcccgtgcagcccgcgaactcttcaaccctgacctatgcaaccctgagctcttcgtcgttggacgcagctgccgccgcagctgctgcatctgccgccagcgccgtgcgcggaatggccatgggcgccggctactacggcactctggtggccaactcgagttccaccaataatcccgccagcctgaacgaggagaagctgttgctgctgatggcccagctcgaggccttgacccagcgcctgggcgagctgacccagcaggtggctcagctgcaggagcagacgcgggccgcggttgccacggtgaaatccaaataaaaaatgaatcaataaataaacggagacggttgttgattttaacacagagtctgaatctttatttgatttttcgcgcgcggtaggccctggaccaccggtctcgatcattgagcacccggtggatcttttccaggacccggtagaggtgggcttggatgttgaggtacatgggcatgagcccgtcccgggggtggaggtagctccattgcagggcctcgtgctcgggggtggtgttgtaaatcacccagtcatagcaggggcgcagggcatggtgttgcacaatatctttgaggaggagactgatggccacgggcagccctttggtgtaggtgtttacaaatctgttgagctgggagggatgcatgcggggggagatgaggtgcatcttggcctggatcttgagattggcgatgttaccgcccagatcccgcctggggttcatgttgtgcaggaccaccagcacggtgtatccggtgcacttggggaatttatcatgcaacttggaagggaaggcgtgaaagaatttggcgacgcctttgtgcccgcccaggttttccatgcactcatccatgatgatggcgatgggcccgtgggcggcggcctgggcaaagacgtttcgggggtcggacacatcatagttgtggtcctgggtgaggtcatcataggccattttaatgaatttggggcggagggtgccggactgggggacaaaggtaccctcgatcccgggggcgtagttcccctcacagatctgcatctcccaggctttgagctcggagggggggatcatgtccacctgcggggcgataaagaacacggtttccggggcgggggagatgagctgggccgaaagcaagttccggagcagctgggacttgccgcagccggtggggccgtagatgaccccgatgaccggctgcaggtggtagttgagggagagacagctgccgtcctcccggaggaggggggccacctcgttcatcatctcgcgcacgtgcatgttctcgcgcaccagttccgccaggaggcgctctccccccagggataggagctcctggagcgaggcgaagtttttcagcggcttgagtccgtcggccatgggcattttggagagggtttgttgcaagagttccaggcggtcccagagctcggtgatgtgctctacggcatctcgatccagcagacctcctcgtttcgcgggttgggacggctgcgggagtagggcaccagacgatgggcgtccagcgcagccagggtccggtccttccagggtcgcagcgtccgcgtcagggtggtctccgtcacggtgaaggggtgcgcgccgggctgggcgcttgcgagggtgcgcttcaggctcatccggctggtcgaaaaccgctcccgatcggcgccctgcgcgtcggccaggtagcaattgaccatgagttcgtagttgagcgcctcggccgcgtggcctttggcgcggagcttacctttggaagtctgcccgcaggcgggacagaggagggacttgagggcgtagagcttgggggcgaggaagacggactcgggggcgtaggcgtccgcgccgcagtgggcgcagacggtctcgcactccacgagccaggtgaggtcgggctggtcggggtcaaaaaccagtttcccgccgttctttttgatgcgtttcttacctttggtctccatgagctcgtgtccccgctgggtgacaaagaggctgtccgtgtccccgtagaccgactttatgggccggtcctcgagcggtgtgccgcggtcctcctcgtagaggaaccccgcccactccgagacgaaagcccgggtccaggccagcacgaaggaggccacgtgggacgggtagcggtcgttgtccaccagcgggtccaccttttccagggtatgcaaacacatgtccccctcgtccacatccaggaaggtgattggcttgtaagtgtaggccacgtgaccgggggtcccggccgggggggtataaaagggtgcgggtccctgctcgtcctcactgtcttccggatcgctgtccaggagcgccagctgttggggtaggtattccctctcgaaggcgggcatgacctcggcactcaggttgtcagtttctagaaacgaggaggatttgatattgacggtgccggcggagatgcctttcaagagcccctcgtccatctggtcagaaaagacgatctttttgttgtcgagcttggtggcgaaggagccgtagagggcgttggagaggagcttggcgatggagcgcatggtctggtttttttccttgtcggcgcgctccttggcggcgatgttgagctgcacgtactcgcgcgccacgcacttccattcggggaagacggtggtcagctcgtcgggcacgattctgacctgccagccccgattatgcagggtgatgaggtccacactggtggccacctcgccgcgcaggggctcattagtccagcagaggcgtccgcccttgcgcgagcagaaggggggcagggggtccagcatgacctcgtcgggggggtcggcatcgatggtgaagatgccgggcaggaggtcggggtcaaagtagctgatggaagtggccagatcgtccagggcagcttgccattcgcgcacggccagcgcgcgctcgtagggactgaggggcgtgccccagggcatgggatgggtaagcgcggaggcgtacatgccgcagatgtcgtagacgtagaggggctcctcgaggatgccgatgtaggtggggtagcagcgccccccgcggatgctggcgcgcacgtagtcatacagctcgtgcgagggggcgaggagccccgggcccaggttggtgcgactgggcttttcggcgcggtagacgatctggcggaaaatggcatgcgagttggaggagatggtgggcctttggaagatgttgaagtgggcgtggggcagtccgaccgagtcgcggatgaagtgggcgtaggagtcttgcagcttggcgacgagctcggcggtgactaggacgtccagagcgcagtagtcgagggtctcctggatgatgtcatacttgagctgtcccttttgtttccacagctcgcggttgagaaggaactcttcgcggtccttccagtactcttcgagggggaacccgtcctgatctgcacggtaagagcctagcatgtagaactggttgacggccttgtaggcgcagcagcccttctccacggggagggcgtaggcctgggcggccttgcgcagggaggtgtgcgtgagggcgaaagtgtccctgaccatgaccttgaggaactggtgcttgaagtcgatatcgtcgcagcccccctgctcccagagctggaagtccgtgcgcttcttgtaggcggggttgggcaaagcgaaagtaacatcgttgaagaggatcttgcccgcgcggggcataaagttgcgagtgatgcggaaaggttggggcacctcggcccggttgttgatgacctgggcggcgagcacgatctcgtcgaagccgttgatgttgtggcccacgatgtagagttccacgaatcgcggacggcccttgacgtggggcagtttcttgagctcctcgtaggtgagctcgtcggggtcgctgagcccgtgctgctcgagcgcccagtcggcgagatgggggttggcgcggaggaaggaagtccagagatccacggccagggcggtttgcagacggtcccggtactgacggaactgctgcccgacggccattttttcgggggtgacgcagtagaaggtgcgggggtccccgtgccagcgatcccatttgagctggagggcgagatcgagggcgagctcgacgagccggtcgtccccggagagtttcatgaccagcatgaaggggacgagctgcttgccgaaggaccccatccaggtgtaggtttccacatcgtaggtgaggaagagcctttcggtgcgaggatgcgagccgatggggaagaactggatctcctgccaccaattggaggaatggctgttgatgtgatggaagtagaaatgccgacggcgcgccgaacactcgtgcttgtgtttatacaagcggccacagtgctcgcaacgctgcacgggatgcacgtgctgcacgagctgtacctgagttcctttgacgaggaatttcagtgggaagtggagtcgtggcgcctgcatctcgtgctgtactacgtcgtggtggtcggcctggccctcttctgcctcgatggtggtcatgctgacgagcccgcgcgggaggcaggtccagacctcggcgcgagcgggtcggagagcgaggacgagggcgcgcaggccggagctgtccagggtcctgagacgctgcggagtcaggtcagtgggcagcggcggcgcgcggttgacttgcaggagtttttccagggcgcgcgggaggtccagatggtacttgatctccaccgcgccattggtggcgacgtcgatggcttgcagggtcccgtgcccctggggtgtgaccaccgtcccccgtttcttcttgggcggctggggcgacgggggcggtgcctcttccatggttagaagcggcggcgaggacgcgcgccgggcggcaggggcggctcggggcccggaggcaggggcggcaggggcacgtcggcgccgcgcgcgggtaggttctggtactgcgcccggagaagactggcgtgagcgacgacgcgacggttgacgtcctggatctgacgcctctgggtgaaggccacgggacccgtgagtttgaacctgaaagagagttcgacagaatcaatctcggtatcgttgacggcggcctgccgcaggatctcttgcacgtcgcccgagttgtcctggtaggcgatctcggtcatgaactgctcgatctcctcctcttgaaggtctccgcggccggcgcgctccacggtggccgcgaggtcgttggagatgcggcccatgagctgcgagaaggcgttcatgcccgcctcgttccagacgcggctgtagaccacgacgccctcgggatcgcgggcgcgcatgaccacctgggcgaggttgagctccacgtggcgcgtgaagaccgcgtagttgcagaggcgctggtagaggtagttgagcgtggtggcgatgtgctcggtgacgaagaaatacatgatccagcggcggagcggcatctcgctgacgtcgcccagcgcctccaaacgttccatggcctcgtaaaagtccacggcgaagttgaaaaactgggagttgcgcgccgagacggtcaactcctcctccagaagacggatgagctcggcgatggtggcgcgcacctcgcgctcgaaggcccccgggagttcctccacttcctcttcttcctcctccactaacatctcttctacttcctcctcaggcggcagtggtggcgggggagggggcctgcgtcgccggcggcgcacgggcagacggtcgatgaagcgctcgatggtctcgccgcgccggcgtcgcatggtctcggtgacggcgcgcccgtcctcgcggggccgcagcgtgaagacgccgccgcgcatctccaggtggccgggggggtccccgttgggcagggagagggcgctgacgatgcatcttatcaattgccccgtagggactccgcgcaaggacctgagcgtctcgagatccacgggatctgaaaaccgctgaacgaaggcttcgagccagtcgcagtcgcaaggtaggctgagcacggtttcttctggcgggtcatgttggttgggagcggggcgggcgatgctgctggtgatgaagttgaaataggcggttctgagacggcggatggtggcgaggagcaccaggtctttgggcccggcttgctggatgcgcagacggtcggccatgccccaggcgtggtcctgacacctggccaggtccttgtagtagtcctgcatgagccgctccacgggcacctcctcctcgcccgcgcggccgtgcatgcgcgtgagcccgaagccgcgctggggctggacgagcgccaggtcggcgacgacgcgctcggcgaggatggcttgctggatctgggtgagggtggtctggaagtcatcaaagtcgacgaagcggtggtaggctccggtgttgatggtgtaggagcagttggccatgacggaccagttgacggtctggtggcccggacgcacgagctcgtggtacttgaggcgcgagtaggcgcgcgtgtcgaagatgtagtcgttgcaggtgcgcaccaggtactggtagccgatgaggaagtgcggcggcggctggcggtagagcggccatcgctcggtggcgggggcgccgggcgcgaggtcctcgagcatggtgcggtggtagccgtagatgtacctggacatccaggtgatgccggcggcggtggtggaggcgcgcgggaactcgcggacgcggttccagatgttgcgcagcggcaggaagtagttcatggtgggcacggtctggcccgtgaggcgcgcgcagtcgtggatgctctatacgggcaaaaacgaaagcggtcagcggctcgactccgtggcctggaggctaagcgaacgggttgggctgcgcgtgtaccccggttcgaatctcgaatcaggctggagccgcagctaacgtggtattggcactcccgtctcgacccaagcctgcaccaaccctccaggatacggaggcgggtcgttttgcaacttttttttggaggccggatgagactagtaagcgcggaaagcggccgaccgcgatggctcgctgccgtagtctggagaagaatcgccagggttgcgttgcggtgtgccccggttcgaggccggccggattccgcggctaacgagggcgtggctgccccgtcgtttccaagaccccatagccagccgacttctccagttacggagcgagcccctcttttgttttgtttgtttttgccagatgcatcccgtactgcggcagatgcgcccccaccaccctccaccgcaacaacagccccctccacagccggcgcttctgcccccgccccagcagcaacttccagccacgaccgccgcggccgccgtgagcggggctggacagagttatgatcaccagctggccttggaagagggcgaggggctggcgcgcctgggggcgtcgtcgccggagcggcacccgcgcgtgcagatgaaaagggacgctcgcgaggcctacgtgcccaagcagaacctgttcagagacaggagcggcgaggagcccgaggagatgcgcgcggcccggttccacgcggggcgggagctgcggcgcggcctggaccgaaagagggtgctgagggacgaggatttcgaggcggacgagctgacggggatcagccccgcgcgcgcgcacgtggccgcggccaacctggtcacggcgtacgagcagaccgtgaaggaggagagcaacttccaaaaatccttcaacaaccacgtgcgcaccctgatcgcgcgcgaggaggtgaccctgggcctgatgcacctgtgggacctgctggaggccatcgtgcagaaccccaccagcaagccgctgacggcgcagctgttcctggtggtgcagcatagtcgggacaacgaagcgttcagggaggcgctgctgaatatcaccgagcccgagggccgctggctcctggacctggtgaacattctgcagagcatcgtggtgcaggagcgcgggctgccgctgtccgagaagctggcggccatcaacttctcggtgctgagtttgggcaagtactacgctaggaagatctacaagaccccgtacgtgcccatagacaaggaggtgaagatcgacgggttttacatgcgcatgaccctgaaagtgctgaccctgagcgacgatctgggggtgtaccgcaacgacaggatgcaccgtgcggtgagcgccagcaggcggcgcgagctgagcgaccaggagctgatgcatagtctgcagcgggccctgaccggggccgggaccgagggggagagctactttgacatgggcgcggacctgcactggcagcccagccgccgggccttggaggcggcggcaggaccctacgtagaagaggtggacgatgaggtggacgaggagggcgagtacctggaagactgatggcgcgaccgtatttttgctagatgcaacaacaacagccacctcctgatcccgcgatgcgggcggcgctgcagagccagccgtccggcattaactcctcggacgattggacccaggccatgcaacgcatcatggcgctgacgacccgcaaccccgaagcctttagacagcagccccaggccaaccggctctcggccatcctggaggccgtggtgccctcgcgctccaaccccacgcacgagaaggtcctggccatcgtgaacgcgctggtggagaacaaggccatccgcggcgacgaggccggcctggtgtacaacgcgctgctggagcgcgtggcccgctacaacagcaccaacgtgcagaccaacctggaccgcatggtgaccgacgtgcgcgaggccgtggcccagcgcgagcggttccaccgcgagtccaacctgggatccatggtggcgctgaacgccttcctcagcacccagcccgccaacgtgccccggggccaggaggactacaccaacttcatcagcgccctgcgcctgatggtgaccgaggtgccccagagcgaggtgtaccagtccgggccggactacttcttccagaccagtcgccagggcttgcagaccgtgaacctgagccaggctttcaagaacttgcagggcctgtggggcgtgcaggccccggtcggggaccgcgcgacggtgtcgagcctgctgacgccgaactcgcgcctgctgctgctgctggtggcccccttcacggacagcggcagcatcaaccgcaactcgtacctgggctacctgattaacctgtaccgcgaggccatcggccaggcgcacgtggacgagcagacctaccaggagatcacccacgtgagccgcgccctgggccaggacgacccgggcaacctggaagccaccctgaactttttgctgaccaaccggtcgcagaagatcccgccccagtacgcgctcagcaccgaggaggagcgcatcctgcgttacgtgcagcagagcgtgggcctgttcctgatgcaggagggggccacccccagcgccgcgctcgacatgaccgcgcgcaacatggagcccagcatgtacgccagcaaccgcccgttcatcaataaactgatggactacttgcatcgggcggccgccatgaactctgactatttcaccaacgccatcctgaatccccactggctcccgccgccggggttctacacgggcgagtacgacatgcccgaccccaatgacgggttcctgtgggacgatgtggacagcagcgtgttctccccccgaccgggtgctaacgagcgccccttgtggaagaaggaaggcagcgaccgacgcccgtcctcggcgctgtccggccgcgagggtgctgccgcggcggtgcccgaggccgccagtcctttcccgagcttgcccttctcgctgaacagtatccgcagcagcgagctgggcaggatcacgcgcccgcgcttgctgggcgaagaggagtacttgaatgactcgctgttgagacccgagcgggagaagaacttccccaataacgggatagaaagcctggtggacaagatgagccgctggaagacgtatgcgcaggagcacagggacgatccccgggcgtcgcagggggccacgagccggggcagcgccgcccgtaaacgccggtggcacgacaggcagcggggacagatgtgggacgatgaggactccgccgacgacagcagcgtgttggacttgggtgggagtggtaacccgttcgctcacctgcgcccccgtatcgggcgcatgatgtaagagaaaccgaaaataaatgatactcaccaaggccatggcgaccagcgtgcgttcgtttcttctctgttgttgttgtatctagtatgatgaggcgtgcgtacccggagggtcctcctccctcgtacgagagcgtgatgcagcaggcgatggcggcggcggcgatgcagcccccgctggaggctccttacgtgcccccgcggtacctggcgcctacggaggggcggaacagcattcgttactcggagctggcacccttgtacgataccacccggttgtacctggtggacaacaagtcggcggacatcgcctcgctgaactaccagaacgaccacagcaacttcctgaccaccgtggtgcagaacaatgacttcacccccacggaggccagcacccagaccatcaactttgacgagcgctcgcggtggggcggccagctgaaaaccatcatgcacaccaacatgcccaacgtgaacgagttcatgtacagcaacaagttcaaggcgcgggtgatggtctcccgcaagacccccaatggggtgacagtgacagaggattatgatggtagtcaggatgagctgaagtatgaatgggtggaatttgagctgcccgaaggcaacttctcggtgaccatgaccatcgacctgatgaacaacgccatcatcgacaattacttggcggtggggcggcagaacggggtgctggagagcgacatcggcgtgaagttcgacactaggaacttcaggctgggctgggaccccgtgaccgagctggtcatgcccggggtgtacaccaacgaggctttccatcccgatattgtcttgctgcccggctgcggggtggacttcaccgagagccgcctcagcaacctgctgggcattcgcaagaggcagcccttccaggaaggcttccagatcatgtacgaggatctggaggggggcaacatccccgcgctcctggatgtcgacgcctatgagaaaagcaaggaggatgcagcagctgaagcaactgcagccgtagctaccgcctctaccgaggtcaggggcgataattttgcaagcgccgcagcagtggcagcggccgaggcggctgaaaccgaaagtaagatagtcattcagccggtggagaaggatagcaagaacaggagctacaacgtactaccggacaagataaacaccgcctaccgcagctggtacctagcctacaactatggcgaccccgagaagggcgtgcgctcctggacgctgctcaccacctcggacgtcacctgcggcgtggagcaagtctactggtcgctgcccgacatgatgcaagacccggtcaccttccgctccacgcgtcaagttagcaactacccggtggtgggcgccgagctcctgcccgtctactccaagagcttcttcaacgagcaggccgtctactcgcagcagctgcgcgccttcacctcgcttacgcacgtcttcaaccgcttccccgagaaccagatcctcgtccgcccgcccgcgcccaccattaccaccgtcagtgaaaacgttcctgctctcacagatcacgggaccctgccgctgcgcagcagtatccggggagtccagcgcgtgaccgttactgacgccagacgccgcacctgcccctacgtctacaaggccctgggcatagtcgcgccgcgcgtcctctcgagccgcaccttctaaatgtccattctcatctcgcccagtaataacaccggttggggcctgcgcgcgcccagcaagatgtacggaggcgctcgccaacgctccacgcaacaccccgtgcgcgtgcgcgggcacttccgcgctccctggggcgccctcaagggccgcgtgcggtcgcgcaccaccgtcgacgacgtgatcgaccaggtggtggccgacgcgcgcaactacacccccgccgccgcgcccgtctccaccgtggacgccgtcatcgacagcgtggtggccgacgcgcgccggtacgcccgcgccaagagccggcggcggcgcatcgcccggcggcaccggagcacccccgccatgcgcgcggcgcgagccttgctgcgcagggccaggcgcacgggacgcagggccatgctcagggcggccagacgcgcggcttcaggcgccagcgccggcaggacccggagacgcgcggccacggcggcggcagcggccatcgccagcatgtcccgcccgcggcgagggaacgtgtactgggtgcgcgacgccgccaccggtgtgcgcgtgcccgtgcgcacccgcccccctcgcacttgaagatgttcacttcgcgatgttgatgtgtcccagcggcgaggaggatgtccaagcgcaaattcaaggaagagatgctccaggtcatcgcgcctgagatctacggccctgcggtggtgaaggaggaaagaaagccccgcaaaatcaagcgggtcaaaaaggacaaaaaggaagaagaaagtgatgtggacggattggtggagtttgtgcgcgagttcgccccccggcggcgcgtgcagtggcgcgggcggaaggtgcaaccggtgctgagacccggcaccaccgtggtcttcacgcccggcgagcgctccggcaccgcttccaagcgctcctacgacgaggtgtacggggatgatgatattctggagcaggcggccgagcgcctgggcgagtttgcttacggcaagcgcagccgttccgcaccgaaggaagaggcggtgtccatcccgctggaccacggcaaccccacgccgagcctcaagcccgtgaccttgcagcaggtgctgccgaccgcggcgccgcgccgggggttcaagcgcgagggcgaggatctgtaccccaccatgcagctgatggtgcccaagcgccagaagctggaagacgtgctggagaccatgaaggtggacccggacgtgcagcccgaggtcaaggtgcggcccatcaagcaggtggccccgggcctgggcgtgcagaccgtggacatcaagattcccacggagcccatggaaacgcagaccgagcccatgatcaagcccagcaccagcaccatggaggtgcagacggatccctggatgccatcggctcctagtcgaagaccccggcgcaagtacggcgcggccagcctgctgatgcccaactacgcgctgcatccttccatcatccccacgccgggctaccgcggcacgcgcttctaccgcggtcataccagcagccgccgccgcaagaccaccactcgccgccgccgtcgccgcaccgccgctgcaaccacccctgccgccctggtgcggagagtgtaccgccgcggccgcgcacctctgaccctgccgcgcgcgcgctaccacccgagcatcgccatttaaactttcgcctgctttgcagatcaatggccctcacatgccgccttcgcgttcccattacgggctaccgaggaagaaaaccgcgccgtagaaggctggcggggaacgggatgcgtcgccaccaccaccggcggcggcgcgccatcagcaagcggttggggggaggcttcctgcccgcgctgatccccatcatcgccgcggcgatcggggcgatccccggcattgcttccgtggcggtgcaggcctctcagcgccactgagacacacttggaaacatcttgtaataaaccaatggactctgacgctcctggtcctgtgatgtgttttcgtagacagatggaagacatcaatttttcgtccctggctccgcgacacggcacgcggccgttcatgggcacctggagcgacatcggcaccagccaactgaacgggggcgccttcaattggagcagtctctggagcgggcttaagaatttcgggtccacgcttaaaacctatggcagcaaggcgtggaacagcaccacagggcaggcgctgagggataagctgaaagagcagaacttccagcagaaggtggtcgatgggctcgcctcgggcatcaacggggtggtggacctggccaaccaggccgtgcagcggcagatcaacagccgcctggacccggtgccgcccgccggctccgtggagatgccgcaggtggaggaggagctgcctcccctggacaagcggggcgagaagcgaccccgccccgatgcggaggagacgctgctgacgcacacggacgagccgcccccgtacgaggaggcggtgaaactgggtctgcccaccacgcggcccatcgcgcccctggccaccggggtgctgaaacccgaaaagcccgcgaccctggacttgcctcctccccagccttcccgcccctctacagtggctaagcccctgccgccggtggccgtggcccgcgcgcgacccgggggcaccgcccgccctcatgcgaactggcagagcactctgaacagcatcgtgggtctgggagtgcagagtgtgaagcgccgccgctgctattaaacctaccgtagcgcttaacttgcttgtctgtgtgtgtatgtattatgtcgccgccgccgctgtccaccagaaggaggagtgaagaggcgcgtcgccgagttgcaagatggccaccccatcgatgctgccccagtgggcgtacatgcacatcgccggacaggacgcttcggagtacctgagtccgggtctggtgcagtttgcccgcgccacagacacctacttcagtctggggaacaagtttaggaaccccacggtggcgcccacgcacgatgtgaccaccgaccgcagccagcggctgacgctgcgcttcgtgcccgtggaccgcgaggacaacacctactcgtacaaagtgcgctacacgctggccgtgggcgacaaccgcgtgctggacatggccagcacctactttgacatccgcggcgtgctggatcggggccctagcttcaaaccctactccggcaccgcctacaacagtctggcccccaagggagcacccaacacttgtcagtggacatataaagccgatggtgaaactgccacagaaaaaacctatacatatggaaatgcacccgtgcagggcattaacatcacaaaagatggtattcaacttggaactgacaccgatgatcagccaatctacgcagataaaacctatcagcctgaacctcaagtgggtgatgctgaatggcatgacatcactggtactgatgaaaagtatggaggcagagctcttaagcctgataccaaaatgaagccttgttatggttcttttgccaagcctactaataaagaaggaggtcaggcaaatgtgaaaacaggaacaggcactactaaagaatatgacatagacatggctttctttgacaacagaagtgcggctgctgctggcctagctccagaaattgttttgtatactgaaaatgtggatttggaaactccagatacccatattgtatacaaagcaggcacagatgacagcagctcttctattaatttgggtcagcaagccatgcccaacagacctaactacattggtttcagagacaactttatcgggctcatgtactacaacagcactggcaatatgggggtgctggccggtcaggcttctcagctgaatgctgtggttgacttgcaagacagaaacaccgagctgtcctaccagctcttgcttgactctctgggtgacagaacccggtatttcagtatgtggaatcaggcggtggacagctatgatcctgatgtgcgcattattgaaaatcatggtgtggaggatgaacttcccaactattgtttccctctggatgctgttggcagaacagatacttatcagggaattaaggctaatggaactgatcaaaccacatggaccaaagatgacagtgtcaatgatgctaatgagataggcaagggtaatccattcgccatggaaatcaacatccaagccaacctgtggaggaacttcctctacgccaacgtggccctgtacctgcccgactcttacaagtacacgccggccaatgttaccctgcccaccaacaccaacacctacgattacatgaacggccgggtggtggcgccctcgctggtggactcctacatcaacatcggggcgcgctggtcgctggatcccatggacaacgtgaaccccttcaaccaccaccgcaatgcggggctgcgctaccgctccatgctcctgggcaacgggcgctacgtgcccttccacatccaggtgccccagaaatttttcgccatcaagagcctcctgctcctgcccgggtcctacacctacgagtggaacttccgcaaggacgtcaacatgatcctgcagagctccctcggcaacgacctgcgcacggacggggcctccatctccttcaccagcatcaacctctacgccaccttcttccccatggcgcacaacacggcctccacgctcgaggccatgctgcgcaacgacaccaacgaccagtccttcaacgactacctctcggcggccaacatgctctaccccatcccggccaacgccaccaacgtgcccatctccatcccctcgcgcaactgggccgccttccgcggctggtccttcacgcgtctcaagaccaaggagacgccctcgctgggctccgggttcgacccctacttcgtctactcgggctccatcccctacctcgacggcaccttctacctcaaccacaccttcaagaaggtctccatcaccttcgactcctccgtcagctggcccggcaacgaccggctcctgacgcccaacgagttcgaaatcaagcgcaccgtcgacggcgagggctacaacgtggcccagtgcaacatgaccaaggactggttcctggtccagatgctggcccactacaacatcggctaccagggcttctacgtgcccgagggctacaaggaccgcatgtactccttcttccgcaacttccagcccatgagccgccaggtggtggacgaggtcaactacaaggactaccaggccgtcaccctggcctaccagcacaacaactcgggcttcgtcggctacctcgcgcccaccatgcgccagggccagccctaccccgccaactacccctacccgctcatcggcaagagcgccgtcaccagcgtcacccagaaaaagttcctctgcgacagggtcatgtggcgcatccccttctccagcaacttcatgtccatgggcgcgctcaccgacctcggccagaacatgctctatgccaactccgcccacgcgctagacatgaatttcgaagtcgaccccatggatgagtccacccttctctatgttgtcttcgaagtcttcgacgtcgtccgagtgcaccagccccaccgcggcgtcatcgaggccgtctacctgcgcacccccttctcggccggtaacgccaccacctaagctcttgcttcttgcaagccatggccgcgggctccggcgagcaggagctcagggccatcatccgcgacctgggctgcgggccctacttcctgggcaccttcgataagcgcttcccgggattcatggccccgcacaagctggcctgcgccatcgtcaacacggccggccgcgagaccgggggcgagcactggctggccttcgcctggaacccgcgctcgaacacctgctacctcttcgaccccttcgggttctcggacgagcgcctcaagcagatctaccagttcgagtacgagggcctgctgcgccgcagcgccctggccaccgaggaccgctgcgtcaccctggaaaagtccacccagaccgtgcagggtccgcgctcggccgcctgcgggctcttctgctgcatgttcctgcacgccttcgtgcactggcccgaccgccccatggacaagaaccccaccatgaacttgctgacgggggtgcccaacggcatgctccagtcgccccaggtggaacccaccctgcgccgcaaccaggaggcgctctaccgcttcctcaactcccactccgcctactttcgctcccaccgcgcgcgcatcgagaaggccaccgccttcgaccgcatgaatcaagacatgtaaaccgtgtgtgtatgttaaatgtctttaataaacagcactttcatgttacacatgcatctgagatgatttatttagaaatcgaaagggttctgccgggtctcggcatggcccgcgggcagggacacgttgcggaactggtacttggccagccacttgaactcggggatcagcagtttgggcagcggggtgtcggggaaggagtcggtccacagcttccgcgtcagttgcagggcgcccagcaggtcgggcgcggagatcttgaaatcgcagttgggacccgcgttctgcgcgcgggagttgcggtacacggggttgcagcactggaacaccatcagggccgggtgcttcacgctcgccagcaccgtcgcgtcggtgatgctctccacgtcgaggtcctcggcgttggccatcccgaagggggtcatcttgcaggtctgccttcccatggtgggcacgcacccgggcttgtggttgcaatcgcagtgcagggggatcagcatcatctgggcctggtcggcgttcatccccgggtacatggccttcatgaaagcctccaattgcctgaacgcctgctgggccttggctccctcggtgaagaagaccccgcaggacttgctagagaactggttggtggcgcacccggcgtcgtgcacgcagcagcgcgcgtcgttgttggccagctgcaccacgctgcgcccccagcggttctgggtgatcttggcccggtcggggttctccttcagcgcgcgctgcccgttctcgctcgccacatccatctcgatcatgtgctccttctggatcatggtggtcccgtgcaggcaccgcagcttgccctcggcctcggtgcacccgtgcagccacagcgcgcacccggtgcactcccagttcttgtgggcgatctgggaatgcgcgtgcacgaagccctgcaggaagcggcccatcatggtggtcagggtcttgttgctagtgaaggtcagcggaatgccgcggtgctcctcgttgatgtacaggtggcagatgcggcggtacacctcgccctgctcgggcatcagctggaagttggctttcaggtcggtctccacgcggtagcggtccatcagcatagtcatgatttccatacccttctcccaggccgagacgatgggcaggctcatagggttcttcaccatcatcttagcgctagcagccgcggccagggggtcgctctcgtccagggtctcaaagctccgcttgccgtccttctcggtgatccgcaccggggggtagctgaagcccacggccgccagctcctcctcggcctgtctttcgtcctcgctgtcctggctgacgtcctgcaggaccacatgcttggtcttgcggggtttcttcttgggcggcagcggcggcggagatgttggagatggcgagggggagcgcgagttctcgctcaccactactatctcttcctcttcttggtccgaggccacgcggcggtaggtatgtctcttcgggggcagaggcggaggcgacgggctctcgccgccgcgacttggcggatggctggcagagccccttccgcgttcgggggtgcgctcccggcggcgctctgactgacttcctccgcggccggccattgtgttctcctagggaggaacaacaagcatggagactcagccatcgccaacctcgccatctgcccccaccgccgacgagaagcagcagcagcagaatgaaagcttaaccgccccgccgcccagccccgccacctccgacgcggccgtcccagacatgcaagagatggaggaatccatcgagattgacctgggctatgtgacgcccgcggagcacgaggaggagctggcagtgcgcttttcacaagaagagatacaccaagaacagccagagcaggaagcagagaatgagcagagtcaggctgggctcgagcatgacggcgactacctccacctgagcgggggggaggacgcgctcatcaagcatctggcccggcaggccaccatcgtcaaggatgcgctgctcgaccgcaccgaggtgcccctcagcgtggaggagctcagccgcgcctacgagttgaacctcttctcgccgcgcgtgccccccaagcgccagcccaatggcacctgcgagcccaacccgcgcctcaacttctacccggtcttcgcggtgcccgaggccctggccacctaccacatctttttcaagaaccaaaagatccccgtctcctgccgcgccaaccgcacccgcgccgacgcccttttcaacctgggtcccggcgcccgcctacctgatatcgcctccttggaagaggttcccaagatcttcgagggtctgggcagcgacgagactcgggccgcgaacgctctgcaaggagaaggaggagagcatgagcaccacagcgccctggtcgagttggaaggcgacaacgcgcggctggcggtgctcaaacgcacggtcgagctgacccatttcgcctacccggctctgaacctgccccccaaagtcatgagcgcggtcatggaccaggtgctcatcaagcgcgcgtcgcccatctccgaggacgagggcatgcaagactccgaggagggcaagcccgtggtcagcgacgagcagctggcccggtggctgggtcctaatgctagtccccagagtttggaagagcggcgcaaactcatgatggccgtggtcctggtgaccgtggagctggagtgcctgcgccgcttcttcgccgacgcggagaccctgcgcaaggtcgaggagaacctgcactacctcttcaggcacgggttcgtgcgccaggcctgcaagatctccaacgtggagctgaccaacctggtctcctacatgggcatcttgcacgagaaccgcctggggcagaacgtgctgcacaccaccctgcgcggggaggcccggcgcgactacatccgcgactgcgtctacctctacctctgccacacctggcagacgggcatgggcgtgtggcagcagtgtctggaggagcagaacctgaaagagctctgcaagctcctgcagaagaacctcaagggtctgtggaccgggttcgacgagcgcaccaccgcctcggacctggccgacctcattttccccgagcgcctcaggctgacgctgcgcaacggcctgcccgactttatgagccaaagcatgttgcaaaactttcgctctttcatcctcgaacgctccggaatcctgcccgccacctgctccgcgctgccctcggacttcgtgccgctgaccttccgcgagtgccccccgccgctgtggagccactgctacctgctgcgcctggccaactacctggcctaccactcggacgtgatcgaggacgtcagcggcgagggcctgctcgagtgccactgccgctgcaacctctgcacgccgcaccgctccctggcctgcaacccccagctgctgagcgagacccagatcatcggcaccttcgagttgcaagggcccagcgaaggcgagggttcagccgccaaggggggtctgaaactcaccccggggctgtggacctcggcctacttgcgcaagttcgtgcccgaggactaccatcccttcgagatcaggttctacgaggaccaatcccatccgcccaaggccgagctgtcggcctgcgtcatcacccagggggcgatcctggcccaattgcaagccatccagaaatcccgccaagaattcttgctgaaaaagggccgcggggtctacctcgacccccagaccggtgaggagctcaaccccggcttcccccaggatgccccgaggaaacaagaagctgaaagtggagctgccgcccgtggaggatttggaggaagactgggagaacagcagtcaggcagaggaggaggagatggaggaagactgggacagcactcaggcagaggaggacagcctgcaagacagtctggaggaagacgaggaggaggcagaggaggaggtggaagaagcagccgccgccagaccgtcgtcctcggcgggggagaaagcaagcagcacggataccatctccgctccgggtcggggtcccgctcgaccacacagtagatgggacgagaccggacgattcccgaaccccaccacccagaccggtaagaaggagcggcagggatacaagtcctggcgggggcacaaaaacgccatcgtctcctgcttgcaggcctgcgggggcaacatctccttcacccggcgctacctgctcttccaccgcggggtgaactttccccgcaacatcttgcattactaccgtcacctccacagcccctactacttccaagaagaggcagcagcagcagaaaaagaccagcagaaaaccagcagctagaaaatccacagcggcggcagcaggtggactgaggatcgcggcgaacgagccggcgcaaacccgggagctgaggaaccggatctttcccaccctctatgccatcttccagcagagtcgggggcaggagcaggaactgaaagtcaagaaccgttctctgcgctcgctcacccgcagttgtctgtatcacaagagcgaagaccaacttcagcgcactctcgaggacgccgaggctctcttcaacaagtactgcgcgctcactcttaaagagtagcccgcgcccgcccagtcgcagaaaaaggcgggaattacgtcacctgtgcccttcgccctagccgcctccacccatcatcatgagcaaagagattcccacgccttacatgtggagctaccagccccagatgggcctggccgccggtgccgcccaggactactccacccgcatgaattggctcagcgccgggcccgcgatgatctcacgggtgaatgacatccgcgcccaccgaaaccagatactcctagaacagtcagcgctcaccgccacgccccgcaatcacctcaatccgcgtaattggcccgccgccctggtgtaccaggaaattccccagcccacgaccgtactacttccgcgagacgcccaggccgaagtccagctgactaactcaggtgtccagctggcgggcggcgccaccctgtgtcgtcaccgccccgctcagggtataaagcggctggtgatccggggcagaggcacacagctcaacgacgaggtggtgagctcttcgctgggtctgcgacctgacggagtcttccaactcgccggatcggggagatcttccttcacgcctcgtcaggccgtcctgactttggagagttcgtcctcgcagccccgctcgggtggcatcggcactctccagttcgtggaggagttcactccctcggtctacttcaaccccttctccggctcccccggccactacccggacgagttcatcccgaacttcgacgccatcagcgagtcggtggacggctacgattgaatgtcccatggtggcgcagctgacctagctcggcttcgacacctggaccactgccgccgcttccgctgcttcgctcgggatctcgccgagtttgcctactttgagctgcccgaggagcaccctcagggcccggcccacggagtgcggatcgtcgtcgaagggggcctcgactcccacctgcttcggatcttcagccagcgtccgatcctggtcgagcgcgagcaaggacagacccttctgactctgtactgcatctgcaaccaccccggcctgcatgaaagtctttgttgtctgctgtgtactgagtataataaaagctgagatcagcgactactccggacttccgtgtgtttaaactcacccccttatccagtgaaataaagatcatattgatgatgattttacagaaataaaaaataatcatttgatttgaaataaagatacaatcatattgatgatttgagtttaacaaaaaaataaagaatcacttacttgaaatctgataccaggtctctgtccatgttttctgccaacaccacttcactcccctcttcccagctctggtactgcaggccccggcgggctgcaaacttcctccacacgctgaaggggatgtcaaattcctcctgtccctcaatcttcattttatcttctatcagatgtccaaaaagcgcgtccgggtggatgatgacttcgaccccgtctacccctacgatgcagacaacgcaccgaccgtgcccttcatcaacccccccttcgtctcttcagatggattccaagagaagcccctgggggtgttgtccctgcgactggccgaccccgtcaccaccaagaacggggaaatcaccctcaagctgggagagggggtggacctcgattcctcgggaaaactcatctccaacacggccaccaaggccgccgcccctctcagtttttccaacaacaccatttcccttaacatggatcaccccttttacactaaagatggaaaattatccttacaagtttctccaccattaaatatactgagaacaagcattctaaacacactagctttaggttttggatcaggtttaggactccgtggctctgccttggcagtacagttagtctctccacttacatttgatactgatggaaacataaagcttaccttagacagaggtttgcatgttacaacaggagatgcaattgaaagcaacataagctgggctaaaggtttaaaatttgaagatggagccatagcaaccaacattggaaatgggttagagtttggaagcagtagtacagaaacaggtgttgatgatgcttacccaatccaagttaaacttggatctggccttagctttgacagtacaggagccataatggctggtaacaaagaagacgataaactcactttgtggacaacacctgatccatcaccaaactgtcaaatactcgcagaaaatgatgcaaaactaacactttgcttgactaaatgtggtagtcaaatactggccactgtgtcagtcttagttgtaggaagtggaaacctaaaccccattactggcaccgtaagcagtgctcaggtgtttctacgttttgatgcaaacggtgttcttttaacagaacattctacactaaaaaaatactgggggtataggcagggagatagcatagatggcactccatataccaatgctgtaggattcatgcccaatttaaaagcttatccaaagtcacaaagttctactactaaaaataatatagtagggcaagtatacatgaatggagatgtttcaaaacctatgcttctcactataaccctcaatggtactgatgacagcaacagtacatattcaatgtcattttcatacacctggactaatggaagctatgttggagcaacatttggggctaactcttataccttctcatacatcgcccaagaatgaacactgtatcccaccctgcatgccaacccttcccaccccactctgtggaacaaactctgaaacacaaaataaaataaagttcaagtgttttattgattcaacagttttacaggattcgagcagttatttttcctccaccctcccaggacatggaatacaccaccctctccccccgcacagccttgaacatctgaatgccattggtgatggacatgcttttggtctccacgttccacacagtttcagagcgagccagtctcgggtcggtcagggagatgaaaccctccgggcactcccgcatctgcacctcacagctcaacagctgaggattgtcctcggtggtcgggatcacggttatctggaagaagcagaagagcggcggtgggaatcatagtccgcgaacgggatcggccggtggtgtcgcatcaggccccgcagcagtcgctgccgccgccgctccgtcaagctgctgctcagggggtccgggtccagggactccctcagcatgatgcccacggccctcagcatcagtcgtctggtgcggcgggcgcagcagcgcatgcggatctcgctcaggtcgctgcagtacgtgcaacacagaaccaccaggttgttcaacagtccatagttcaacacgctccagccgaaactcatcgcgggaaggatgctacccacgtggccgtcgtaccagatcctcaggtaaatcaagtggtgccccctccagaacacgctgcccacgtacatgatctccttgggcatgtggcggttcaccacctcccggtaccacatcaccctctggttgaacatgcagccccggatgatcctgcggaaccacagggccagcaccgccccgcccgccatgcagcgaagagaccccgggtcccggcaatggcaatggaggacccaccgctcgtacccgtggatcatctgggagctgaacaagtctatgttggcacagcacaggcatatgctcatgcatctcttcagcactctcaactcctcgggggtcaaaaccatatcccagggcacggggaactcttgcaggacagcgaaccccgcagaacagggcaatcctcgcacagaacttacattgtgcatggacagggtatcgcaatcaggcagcaccgggtgatcctccaccagagaagcgcgggtctcggtctcctcacagcgtggtaagggggccggccgatacgggtgatggcgggacgcggctgatcgtgttcgcgaccgtgtcatgatgcagttgctttcggacattttcgtacttgctgtagcagaacctggtccgggcgctgcacaccgatcgccggcggcggtctcggcgcttggaacgctcggtgttgaaattgtaaaacagccactctctcagaccgtgcagcagatctagggcctcaggagtgatgaagatcccatcatgcctgatggctctgatcacatcgaccaccgtggaatgggccagacccagccagatgatgcaattttgttgggtttcggtgacggcgggggagggaagaacaggaagaaccatgattaacttttaatccaaacggtctcggagtacttcaaaatgaagatcgcggagatggcacctctcgcccccgctgtgttggtggaaaataacagccaggtcaaaggtgatacggttctcgagatgttccacggtggcttccagcaaagcctccacgcgcacatccagaaacaagacaatagcgaaagcgggagggttctctaattcctcaatcatcatgttacactcctgcaccatccccagataattttcatttttccagccttgaatgattcgaactagttcctgaggtaaatccaagccagccatgataaagagctcgcgcagagcgccctccaccggcattcttaagcacaccctcataattccaagatattctgctcctggttcacctgcagcagattgacaagcggaatatcaaaatctctgccgcgatccctgagctcctccctcagcaataactgtaagtactctttcatatcctctccgaaatttttagccataggaccaccaggaataagattagggcaagccacagtacagataaaccgaagtcctccccagtgagcattgccaaatgcaagactgctataagcatgctggctagacccggtgatatcttccagataactggacagaaaatcgcccaggcaatttttaagaaaatcaacaaaagaaaaatcctccaggtggacgtttagagcctcgggaacaacgatgaagtaaatgcaagcggtgcgttccagcatggttagttagctgatctgtagaaaaaacaaaaatgaacattaaaccatgctagcctggcgaacaggtgggtaaatcgttctctccagcaccaggcaggccacggggtctccggcgcgaccctcgtaaaaattgtcgctatgattgaaaaccatcacagagagacgttcccggtggccggcgtgaatgattcgacaagatgaatacacccccggaacattggcgtccgcgagtgaaaaaaagcgcccgaggaagcaataaggcactacaatgctcagtctcaagtccagcaaagcgatgccatgcggatgaagcacaaaattctcaggtgcgtacaaaatgtaattactcccctcctgcacaggcagcaaagcccccgatccctccaggtacacatacaaagcctcagcgtccatagcttaccgagcagcagcacacaacaggcgcaagagtcagagaaaggctgagctctaacctgtccacccgctctctgctcaatatatagcccagatctacactgacgtaaaggccaaagtctaaaaatacccgccaaataatcacacacgcccagcacacgcccagaaaccggtgacacactcaaaaaaatacgcgcacttcctcaaacgcccaaaactgccgtcatttccgggttcccacgctacgtcatcaaaacacgactttcaaattccgtcgaccgttaaaaacgtcacccgccccgcccctaacggtcgcccgtctctcagccaatcagcgccccgcatccccaaattcaaacacctcatttgcatattaacgcgcacaaaaagtttgaggtatattattgatgatgg

SEQ ID NO: 76 - protein, 19 aa, Artificial Sequence
  Synthetic Construct
HYAGYFADLLIHDIETNPG

SEQ ID NO: 77 - protein, 19 aa, Artificial Sequence
  Synthetic Construct
QCTNYALLKLAGDVESNPG

SEQ ID NO: 78 - protein, 19 aa, Artificial Sequence
  Synthetic Construct
GATNFSLLKLAGDVELNPG

SEQ ID NO: 79 - protein, 18 aa, Artificial Sequence
  Synthetic Construct
ATNFSLLKQAGDVEENPG

SEQ ID NO: 80 - protein, 17 aa, Artificial Sequence
  Synthetic Construct
EGRGSLLTCGDVEENPG

SEQ ID NO: 81 - protein, 1134 aa, Artificial Sequence
  Synthetic Construct
MASPRAPRCRAVRSLLRSHYREVLPLATFVRRLGPQGWRLVQRGDPAAFRALVAQCLVCVPWDARPPPAAPSFRQVSCLKELVARVLQRLCERGAKNVLAFGFALLDGARGGPPEAFTTSVRSYLPNTVTDALRGSGAWGLLLRRVGDDVLVHLLARCALFVLVAPSCAYQVCGPPLYQLGAATQARPPPHASGPRRRLGCERAWNHSVREAGVPLGLPAPGARRRGGSASRSLPLPKRPRRGAAPEPERTPVGQGSWAHPGRTRGPSDRGFCVVSPARPAEEATSLEGALSGTRHSHPSVGRQHHAGPPSTSRPPRPWDTPCPPVYAETKHFLYSSGDKEQLRPSFLLSSLRPSLTGARRLVETIFLGSRPWMPGTPRRLPRLPQRYWQMRPLFLELLGNHAQCPYGVLLKTHCPLRAAVTPAAGVCAREKPQGSVAAPEEEDTDPRRLVQLLRQHSSPWQVYGFVRACLRRLVPPGLWGSRHNERRFLRNTKKFISLGKHAKLSLQELTWKMSVRDCAWLRRSPGVGCVPAAEHRLREEILAKFLHWLMSVYVVELLRSFFYVTETTFQKNRLFFYRKSVWSKLQSIGIRQHLKRVQLRELSEAEVRQHREARPALLTSRLRFIPKPDGLRPIVNMDYVVGARTFRREKRAERLTSRVKALFSVLNYERARRPGLLGASVLGLDDIHRAWRTFVLRVRAQDPPPELYFVKVAITGAYDTIPQDRLTEVIASIIKPQNTYCVRRYAVVQKAAHGHVRKAFKSHVSTLTDLQPYMRQFVAHLQETSPLRDAVVIEQSSSLNEASSGLFDVFLRFMCHHAVRIRGKSYVQCQGIPQGSILSTLLCSLCYGDMENKLFAGIRRDGLLLRLVDDFLLVTPHLTHAKTFLRTLVRGVPEYGCVVNLRKTVVNFPVEDEALGGTAFVQMPAHGLFPWCGLLLDTRTLEVQSDYSSYARTSIRASLTFNRGFKAGRNMRRKLFGVLRLKCHSLFLDLQVNSLQTVCTNIYKILLLQAYRFHACVLQLPFHQQVWKNPTFFLRVISDTASLCYSILKAKNAGMSLGAKGAAGPLPSEAVQWLCHQAFLLKLTRHRVTYVPLLGSLRTAQTQLSRKLPGTTLTALEAAANPALPSDFKTILD

SEQ ID NO: 82 - DNA, 3402 bp, Artificial Sequence
  Synthetic Construct
atggctagcccgcgcgctccaagatgtcgggccgtccgctcgctcctgaggtcgcattacagagaagtgctgcctttggccacgttcgtgcgccggctcggaccgcagggatggcggcttgtgcagcggggcgacccggctgccttccgcgctctcgtggcgcaatgcttggtgtgcgttccatgggacgcacgccctccccctgcagcgccctcgttccgccaagtcagctgcctgaaggaactcgtcgccagagtcctgcagagactgtgtgagagaggggcgaaaaatgtgctcgcgttcggattcgcactgctggatggagcaagggggggtccgccagaagcgttcacgactagcgtgcgctcctacctcccaaatactgtgaccgacgccctccgcggatcaggagcctggggcctccttttgaggcgggtgggcgatgacgtgctggtgcacctcctcgcgcgatgcgccctgttcgtgctcgtggccccgtcctgcgcctaccaggtctgcggccccccgttgtaccaactgggggccgccacgcaggctcggccgccacctcatgcatccggcccacggaggcgactcggttgtgaacgggcctggaaccattcggtgcgggaggctggtgttccactgggactgcccgctcctggtgccagacgccggggaggttcggcgtcacgctcgttgccactgccgaagcggcccagacggggagctgccccggagccggagaggacccccgttggccagggatcgtgggcccatccgggacgcaccaggggaccatccgacaggggattctgtgtggtgtcaccggccaggccagcagaagaggcaaccagcctcgagggagcgttgtctggaaccagacattcccacccgtcggtgggccggcagcaccacgcgggaccaccgtccacttccagaccgccacggccatgggacaccccttgcccgcctgtgtatgccgagactaaacacttcctgtactcatccggagacaaggaacagcttcggccgtccttcctcctgtcgtcgctcagaccgagcctgaccggagcacgcagattggtggaaactatcttccttgggtcacgtccgtggatgccaggtaccccacggcgcctcccgcgcctcccacagagatactggcagatgcggcctctgttcctggaattgctgggaaaccacgctcagtgcccgtacggagtcctgctcaagactcactgccctctgagggcggcggtcactccggcggccggagtgtgcgcacgggagaagccccagggaagcgtggcagctccggaagaggaggacaccgatccgcgccgcctcgtgcaacttctgcgccagcactcctcgccctggcaagtctacgggttcgtccgcgcctgcctgcgccgcctggtgccgcctgggctctggggttcccggcataacgagcgccgcttcctgagaaatactaagaagtttatctcacttggaaaacatgccaagttgtcgctgcaagaactcacgtggaagatgtcagtccgcgattgcgcctggctgcgccgctcgccgggcgtcgggtgtgttccagctgcagaacaccgcctgagagaagaaattctggccaaatttctgcattggctgatgtcagtgtacgtggtcgagctgctgcgctcctttttctacgtcactgagactacctttcaaaagaaccgcctgttcttctaccgcaaatctgtgtggagcaagctgcagtcaatcggcattcgccagcatctgaagagggtgcagctgcgggaactttccgaggcagaagtccgccagcaccgggaggcccggccggcgcttctcacgtcgcgtctgagattcatcccaaagcccgacgggctgaggcctatcgtcaacatggattacgtcgtgggcgctcgcacctttcgccgtgaaaagcgggccgaacgcttgacctcacgggtgaaggccctcttctccgtgctgaactacgagagagcaagacggcctggcctgctgggagcttcggtgctgggactggacgatatccaccgggcttggcggacctttgttctccgggtgagagcccaagaccctccgccggaactgtacttcgtgaaggtggcgatcaccggagcctatgatactattccgcaagatcgactcaccgaagtcatcgcctcgatcatcaaaccgcagaacacttactgcgtcaggcggtacgccgtggtccagaaggccgcgcatggccacgtgagaaaggcgttcaagtcgcacgtgtccactctcaccgacctccagccttacatgaggcaattcgttgcgcatttgcaagagacttcgcccctgagagatgcggtggtcatcgagcagagctccagcctgaacgaagcgagcagcggtctgtttgacgtgttcctccgcttcatgtgtcatcacgcggtgcgaatcaggggaaaatcatacgtgcagtgccagggaatcccacaaggcagcattctgtcgactctcttgtgttccctttgctacggcgatatggaaaacaagctgttcgctgggatcagacgggacgggttgctgctcagactggtggacgacttcctgctggtgactccgcacctcactcacgccaaaacctttctccgcactctggtgaggggagtgccagaatacggctgtgtggtcaatctccggaaaactgtggtgaatttccctgtcgaggatgaggcactcggaggaaccgcatttgtccaaatgccagcacatggcctgttcccatggtgcggtctgctgctggacacccgaactcttgaagtgcagtccgactactccagctatgcccggacgagcatccgcgccagcctcactttcaatcgcggctttaaggccggacgaaacatgcgcagaaagcttttcggagtcctccggcttaaatgccattcgctctttctcgatctccaagtcaattcgctgcagaccgtgtgcacgaacatctacaagatcctgctgctccaagcctaccggttccacgcttgcgtgcttcagctgccgtttcaccaacaggtgtggaagaacccgaccttctttctgcgggtcattagcgatactgcctccctgtgttactcaatcctcaaggcaaagaacgccggaatgtcgctgggtgcgaaaggagccgcgggacctcttcctagcgaagcggtgcagtggctctgccaccaggctttcctcctgaagctgaccaggcacagagtgacctacgtcccgctgctgggctcgctgcgcactgcacagacccagctgtctagaaaactccccggcaccaccctgaccgctctggaagccgccgccaacccagcattgccgtcagatttcaagaccatcttggac

SEQ ID NO: 83 - DNA, 7149 bp, Artificial Sequence
  Synthetic Construct
ggcgtaatgctctgccagtgttacaaccaattaaccaattctgattagaaaaactcatcgagcatcaaatgaaactgcaatttattcatatcaggattatcaataccatatttttgaaaaagccgtttctgtaatgaaggagaaaactcaccgaggcagttccataggatggcaagatcctggtatcggtctgcgattccgactcgtccaacatcaatacaacctattaatttcccctcgtcaaaaataaggttatcaagtgagaaatcaccatgagtgacgactgaatccggtgagaatggcaaaagcttatgcatttctttccagacttgttcaacaggccagccattacgctcgtcatcaaaatcactcgcatcaaccaaaccgttattcattcgtgattgcgcctgagcgagacgaaatacgcgatcgctgttaaaaggacaattacaaacaggaatcaaatgcaaccggcgcaggaacactgccagcgcatcaacaatattttcacctgaatcaggatattcttctaatacctggaatgctgttttcccggggatcgcagtggtgagtaaccatgcatcatcaggagtacggataaaatgcttgatggtcggaagaggcataaattccgtcagccagtttagtctgaccatctcatctgtaacatcattggcaacgctacctttgccatgtttcagaaacaactctggcgcatcgggcttcccatacaatcgatagattgtcgcacctgattgcccgacattatcgcgagcccatttatacccatataaatcagcatccatgttggaatttaatcgcggcctcgagcaagacgtttcccgttgaatatggctcataacaccccttgtattactgtttatgtaagcagacaggtcgacaatattggctattggccattgcatacgttgtatctatatcataatatgtacatttatattggctcatgtccaatatgaccgccatgttgacattgattattgactagttattaatagtaatcaattacggggtcattagttcatagcccatatatggagttccgcgttacataacttacggtaaatggcccgcctggctgaccgcccaacgacccccgcccattgacgtcaataatgacgtatgttcccatagtaacgccaatagggactttccattgacgtcaatgggtggagtatttacggtaaactgcccacttggcagtacatcaagtgtatcatatgccaagtccgccccctattgacgtcaatgacggtaaatggcccgcctggcattatgcccagtacatgaccttacgggactttcctacttggcagtacatctacgtattagtcatcgctattaccatggtgatgcggttttggcagtacaccaatgggcgtggatagcggtttgactcacggggatttccaagtctccaccccattgacgtcaatgggagtttgttttggcaccaaaatcaacgggactttccaaaatgtcgtaataaccccgccccgttgacgcaaatgggcggtaggcgtgtacggtgggaggtctatataagcagagctcgtttagtgaaccgtcagatcgcctggagacgccatccacgctgttttgacctccatagaagacaccgggaccgatccagcctccgcggccgggaacggtgcattggaacgcggattccccgtgccaagagtgactcaccgtccggatctcagcaagcaggtatgtactctccagggtgggcctggcttccccagtcaagactccagggatttgagggacgctgtgggctcttctcttacatgtaccttttgcttgcctcaaccctgactatcttccaggtcaggatcccagagtcaggggtctgtattttcctgctggtggctccagttcaggaacagtaaaccctgctccgaatattgcctctcacatctcgtcaatctccgcgaggactggggaccctgtgacgaacatggctagcccgcgcgctccaagatgtcgggccgtccgctcgctcctgaggtcgcattacagagaagtgctgcctttggccacgttcgtgcgccggctcggaccgcagggatggcggcttgtgcagcggggcgacccggctgccttccgcgctctcgtggcgcaatgcttggtgtgcgttccatgggacgcacgccctccccctgcagcgccctcgttccgccaagtcagctgcctgaaggaactcgtcgccagagtcctgcagagactgtgtgagagaggggcgaaaaatgtgctcgcgttcggattcgcactgctggatggagcaagggggggtccgccagaagcgttcacgactagcgtgcgctcctacctcccaaatactgtgaccgacgccctccgcggatcaggagcctggggcctccttttgaggcgggtgggcgatgacgtgctggtgcacctcctcgcgcgatgcgccctgttcgtgctcgtggccccgtcctgcgcctaccaggtctgcggccccccgttgtaccaactgggggccgccacgcaggctcggccgccacctcatgcatccggcccacggaggcgactcggttgtgaacgggcctggaaccattcggtgcgggaggctggtgttccactgggactgcccgctcctggtgccagacgccggggaggttcggcgtcacgctcgttgccactgccgaagcggcccagacggggagctgccccggagccggagaggacccccgttggccagggatcgtgggcccatccgggacgcaccaggggaccatccgacaggggattctgtgtggtgtcaccggccaggccagcagaagaggcaaccagcctcgagggagcgttgtctggaaccagacattcccacccgtcggtgggccggcagcaccacgcgggaccaccgtccacttccagaccgccacggccatgggacaccccttgcccgcctgtgtatgccgagactaaacacttcctgtactcatccggagacaaggaacagcttcggccgtccttcctcctgtcgtcgctcagaccgagcctgaccggagcacgcagattggtggaaactatcttccttgggtcacgtccgtggatgccaggtaccccacggcgcctcccgcgcctcccacagagatactggcagatgcggcctctgttcctggaattgctgggaaaccacgctcagtgcccgtacggagtcctgctcaagactcactgccctctgagggcggcggtcactccggcggccggagtgtgcgcacgggagaagccccagggaagcgtggcagctccggaagaggaggacaccgatccgcgccgcctcgtgcaacttctgcgccagcactcctcgccctggcaagtctacgggttcgtccgcgcctgcctgcgccgcctggtgccgcctgggctctggggttcccggcataacgagcgccgcttcctgagaaatactaagaagtttatctcacttggaaaacatgccaagttgtcgctgcaagaactcacgtggaagatgtcagtccgcgattgcgcctggctgcgccgctcgccgggcgtcgggtgtgttccagctgcagaacaccgcctgagagaagaaattctggccaaatttctgcattggctgatgtcagtgtacgtggtcgagctgctgcgctcctttttctacgtcactgagactacctttcaaaagaaccgcctgttcttctaccgcaaatctgtgtggagcaagctgcagtcaatcggcattcgccagcatctgaagagggtgcagctgcgggaactttccgaggcagaagtccgccagcaccgggaggcccggccggcgcttctcacgtcgcgtctgagattcatcccaaagcccgacgggctgaggcctatcgtcaacatggattacgtcgtgggcgctcgcacctttcgccgtgaaaagcgggccgaacgcttgacctcacgggtgaaggccctcttctccgtgctgaactacgagagagcaagacggcctggcctgctgggagcttcggtgctgggactggacgatatccaccgggcttggcggacctttgttctccgggtgagagcccaagaccctccgccggaactgtacttcgtgaaggtggcgatcaccggagcctatgatactattccgcaagatcgactcaccgaagtcatcgcctcgatcatcaaaccgcagaacacttactgcgtcaggcggtacgccgtggtccagaaggccgcgcatggccacgtgagaaaggcgttcaagtcgcacgtgtccactctcaccgacctccagccttacatgaggcaattcgttgcgcatttgcaagagacttcgcccctgagagatgcggtggtcatcgagcagagctccagcctgaacgaagcgagcagcggtctgtttgacgtgttcctccgcttcatgtgtcatcacgcggtgcgaatcaggggaaaatcatacgtgcagtgccagggaatcccacaaggcagcattctgtcgactctcttgtgttccctttgctacggcgatatggaaaacaagctgttcgctgggatcagacgggacgggttgctgctcagactggtggacgacttcctgctggtgactccgcacctcactcacgccaaaacctttctccgcactctggtgaggggagtgccagaatacggctgtgtggtcaatctccggaaaactgtggtgaatttccctgtcgaggatgaggcactcggaggaaccgcatttgtccaaatgccagcacatggcctgttcccatggtgcggtctgctgctggacacccgaactcttgaagtgcagtccgactactccagctatgcccggacgagcatccgcgccagcctcactttcaatcgcggctttaaggccggacgaaacatgcgcagaaagcttttcggagtcctccggcttaaatgccattcgctctttctcgatctccaagtcaattcgctgcagaccgtgtgcacgaacatctacaagatcctgctgctccaagcctaccggttccacgcttgcgtgcttcagctgccgtttcaccaacaggtgtggaagaacccgaccttctttctgcgggtcattagcgatactgcctccctgtgttactcaatcctcaaggcaaagaacgccggaatgtcgctgggtgcgaaaggagccgcgggacctcttcctagcgaagcggtgcagtggctctgccaccaggctttcctcctgaagctgaccaggcacagagtgacctacgtcccgctgctgggctcgctgcgcactgcacagacccagctgtctagaaaactccccggcaccaccctgaccgctctggaagccgccgccaacccagcattgccgtcagatttcaagaccatcttggactgaagatctgggccctaacaaaacaaaaagatggggttattccctaaacttcatgggttacgtaattggaagttgggggacattgccacaagatcatattgtacaaaagatcaaacactgttttagaaaacttcctgtaaacaggcctattgattggaaagtatgtcaaaggattgtgggtcttttgggctttgctgctccatttacacaatgtggatatcctgccttaatgcctttgtatgcatgtatacaagctaaacaggctttcactttctcgccaacttacaaggcctttctaagtaaacagtacatgaacctttaccccgttgctcggcaacggcctggtctgtgccaagtgtttgctgacgcaacccccactggctggggcttggccataggccatcagcgcatgcgtggaacctttgtggctcctctgccgatccatactgcggaactcctagccgcttgttttgctcgcagccggtctggagcaaagctcataggaactgacaattctgtcgtcctctcgcggaaatatacatcgtttcgatctacgtatgatctttttccctctgccaaaaattatggggacatcatgaagccccttgagcatctgacttctggctaataaaggaaatttattttcattgcaatagtgtgttggaattttttgtgtctctcactcggaaggaattctgcattaatgaatcggccaacgcgcggggagaggcggtttgcgtattgggcgctcttccgcttcctcgctcactgactcgctgcgctcggtcgttcggctgcggcgagcggtatcagctcactcaaaggcggtaatacggttatccacagaatcaggggataacgcaggaaagaacatgtgagcaaaaggccagcaaaaggccaggaaccgtaaaaaggccgcgttgctggcgtttttccataggctccgcccccctgacgagcatcacaaaaatcgacgctcaagtcagaggtggcgaaacccgacaggactataaagataccaggcgtttccccctggaagctccctcgtgcgctctcctgttccgaccctgccgcttaccggatacctgtccgcctttctcccttcgggaagcgtggcgctttctcatagctcacgctgtaggtatctcagttcggtgtaggtcgttcgctccaagctgggctgtgtgcacgaaccccccgttcagcccgaccgctgcgccttatccggtaactatcgtcttgagtccaacccggtaagacacgacttatcgccactggcagcagccactggtaacaggattagcagagcgaggtatgtaggcggtgctacagagttcttgaagtggtggcctaactacggctacactagaagaacagtatttggtatctgcgctctgctgaagccagttaccttcggaaaaagagttggtagctcttgatccggcaaacaaaccaccgctggtagcggtggtttttttgtttgcaagcagcagattacgcgcagaaaaaaaggatctcaagaagatcctttgatcttttctacggggtctgacgctcagtggaacgaaaactcacgttaagggattttggtcatgagattatcaaaaaggatcttcacctagatccttttaaattaaaaatgaagttttaaatcaatctaaagtatatatgagtaaacttggtctgacagttaccaatgcttaatcagtgaggcacctatctcagcgatctgtctatttcgttcatccatagttgcctgactc

SEQ ID NO: 84 - RNA, 1611 nt, Artificial Sequence
  Synthetic Construct
auggcuagcaccccuggaacccagagccccuucuuccuucugcugcugcugaccgugcugacugucgugacaggcucuggccacgccagcucuacaccuggcggcgagaaagagacaagcgccacccagagaagcagcgugccaagcagcaccgagaagaacgccguguccaugaccagcuccgugcugagcagccacucuccuggcagcggcagcagcacaacacagggccaggaugugacacuggccccugccacagaaccugccucuggaucugccgccaccuggggacaggacgugacaagcgugccagugaccagaccugcccugggcucuacaacacccccugcccacgaugugaccagcgccccugauaacaagccugccccuggaagcacagccccuccagcucauggcgugaccucugccccagauaccagaccagccccaggaucuacagccccacccgcacacggcgugacaagugccccugacacaagacccgcuccaggcucuacugcuccuccugcccauggcgugacaagcgcucccgauacaaggccagcuccuggcuccacagcaccaccagcacauggcgugacaucagcucccgacacuagaccugcucccggaucaaccgcuccaccagcucacggcgugaccagcgcaccugauaccagaccugcucugggaagcaccgccccucccgugcacaaugugacaucugcuuccggcagcgccagcggcucugccucuacacuggugcacaacggcaccagcgccagagccacaacaaccccagccagcaagagcacccccuucagcaucccuagccaccacagcgacaccccuaccacacuggccagccacuccaccaagaccgaugccucuagcacccaccacuccagcgugcccccucugaccagcagcaaccacagcacaagcccccagcugucuaccggcgucucauucuucuuucuguccuuccacaucagcaaccugcaguucaacagcagccuggaagaucccagcaccgacuacuaccaggaacugcagcgggauaucagcgagauguuccugcaaaucuacaagcagggcggcuuccugggccugagcaacaucaaguucagacccggcagcgugguggugcagcugacccuggcuuuccgggaaggcaccaucaacgugcacgacguggaaacccaguucaaccaguacaagaccgaggccgccagccgguacaaccugaccaucuccgauguguccguguccgacgugcccuucccauucucugcccagucuggcgcaggcgugccaggauggggaauugcucugcuggugcucgugugcgugcugguggcccuggccaucguguaucugauugcccuggccgugugccagugccggcggaagaauuacggccagcuggacaucuuccccgccagagacaccuaccaccccaugagcgaguaccccacauaccacacccacggcagauacgugccacccagcuccaccgacagaucccccuacgagaaagugucugccggcaacggcggcagcucccugagcuacacaaauccugccguggccgcugccuccgccaaccug

SEQ ID NO: 85 - RNA, 2679 nt, Artificial Sequence
  Synthetic Construct
augggagcugccccggagccggagaggacccccguuggccagggaucgugggcccauccgggacgcaccaggggaccauccgacaggggauucuguguggugucaccggccaggccagcagaagaggcaaccagccucgagggagcguugucuggaaccagacauucccacccgucggugggccggcagcaccacgcgggaccaccguccacuuccagaccgccacggccaugggacaccccuugcccgccuguguaugccgagacuaaacacuuccuguacucauccggagacaaggaacagcuucggccguccuuccuccugucgucgcucagaccgagccugaccggagcacgcagauugguggaaacuaucuuccuugggucacguccguggaugccagguaccccacggcgccucccgcgccucccacagagauacuggcagaugcggccucuguuccuggaauugcugggaaaccacgcucagugcccguacggaguccugcucaagacucacugcccucugagggcggcggucacuccggcggccggagugugcgcacgggagaagccccagggaagcguggcagcuccggaagaggaggacaccgauccgcgccgccucgugcaacuucugcgccagcacuccucgcccuggcaagucuacggguucguccgcgccugccugcgccgccuggugccgccugggcucugggguucccggcauaacgagcgccgcuuccugagaaauacuaagaaguuuaucucacuuggaaaacaugccaaguugucgcugcaagaacucacguggaagaugucaguccgcgauugcgccuggcugcgccgcucgccgggcgucggguguguuccagcugcagaacaccgccugagagaagaaauucuggccaaauuucugcauuggcugaugucaguguacguggucgagcugcugcgcuccuuuuucuacgucacugagacuaccuuucaaaagaaccgccuguucuucuaccgcaaaucuguguggagcaagcugcagucaaucggcauucgccagcaucugaagagggugcagcugcgggaacuuuccgaggcagaaguccgccagcaccgggaggcccggccggcgcuucucacgucgcgucugagauucaucccaaagcccgacgggcugaggccuaucgucaacauggauuacgucgugggcgcucgcaccuuucgccgugaaaagcgggccgaacgcuugaccucacgggugaaggcccucuucuccgugcugaacuacgagagagcaagacggccuggccugcugggagcuucggugcugggacuggacgauauccaccgggcuuggcggaccuuuguucuccgggugagagcccaagacccuccgccggaacuguacuucgugaagguggcgaucaccggagccuaugauacuauuccgcaagaucgacucaccgaagucaucgccucgaucaucaaaccgcagaacacuuacugcgucaggcgguacgccgugguccagaaggccgcgcauggccacgugagaaaggcguucaagucgcacguguccacucucaccgaccuccagccuuacaugaggcaauucguugcgcauuugcaagagacuucgccccugagagaugcgguggucaucgagcagagcuccagccugaacgaagcgagcagcggucuguuugacguguuccuccgcuucaugugucaucacgcggugcgaaucaggggaaaaucauacgugcagugccagggaaucccacaaggcagcauucugucgacucucuuguguucccuuugcuacggcgauauggaaaacaagcuguucgcugggaucagacgggacggguugcugcucagacugguggacgacuuccugcuggugacuccgcaccucacucacgccaaaaccuuucuccgcacucuggugaggggagugccagaauacggcuguguggucaaucuccggaaaacuguggugaauuucccugucgaggaugaggcacucggaggaaccgcauuuguccaaaugccagcacauggccuguucccauggugcggucugcugcuggacacccgaacucuugaagugcaguccgacuacuccagcuaugcccggacgagcauccgcgccagccucacuuucaaucgcggcuuuaaggccggacgaaacaugcgcagaaagcuuuucggaguccuccggcuuaaaugccauucgcucuuucucgaucuccaagucaauucgcugcagaccgugugcacgaacaucuacaagauccugcugcuccaagccuaccgguuccacgcuugcgugcuucagcugccguuucaccaacagguguggaagaacccgaccuucuuucugcgggucauuagcgauacugccucccuguguuacucaauccucaaggcaaagaacgccggaaugucgcugggugcgaaaggagccgcgggaccucuuccuagcgaagcggugcaguggcucugccaccaggcuuuccuccugaagcugaccaggcacagagugaccuacgucccgcugcugggcucgcugcgcacugcacagacccagcugucuagaaaacuccccggcaccacccugaccgcucuggaagccgccgccaacccagcauugccgucagauuucaagaccaucuuggac

SEQ ID NO: 86 - RNA, 1404 nt, Artificial Sequence
  Synthetic Construct
auggcuagcaagcugaccauugagagcacucccuucaacguggcugaggggaaggaggugcugcuccuggugcacaaucugccccagcaccuguucggguacuccugguacaagggagaacgcguggacgggaaccggcagaucauaggcuacgucaucggaacccagcaggccacacccgguccagcguacagcggccgggagauuaucuacccgaacgccucccugcugauccaaaacaucauccagaacgacaccgguuucuacacucugcacgugauuaagucagaucuggucaacgaagaggccaccggccaauucaggguguaccccgaacucccuaagccguucaucaccucgaacaacagcaacccggucgaggaugaagaugcgguggccuugacgugcgaaccugagauccagaacaccaccuacuuguggugggugaacaaucagagccugccagucuccccacgacuccagcugucgaacgacaacaggacccugacuuugcuguccgugacucggaacgacgugggcccuuaugaaugcgguauccagaacaagcuguccguggaccacagcgacccugugauccugaacguccuuuacgggccggacgaccccaccauuuccccgucguacacuuacuaccggccgggcgugaaccugucccugucgugccacgcugccuccaauccgccggcccaguacuccuggcucaucgacggaaacauccagcagcacacccaagaacuguucaucuccaacauuaccgagaaaaacucgggacuuuacaccugucaagccaacaauuccgccagcggccacucccgcaccacugucaaaacuaucacuguguccgccgaacucccgaagcccagcaucagcuccaacaacucgaagcccguggaggauaaggacgcugucgcguucaccugugaaccagaggcacagaauaccaccuaccuuuggugggucaacggacagucccugccugucucaccgagacugcagcugucaaacgggaauaggacucugaccuuguuuaacgucacccggaacgacgcccgggccuacgugugcggcauccagaacuccgugagcgcaaaccggucugacccagugacccuggaugugcuguacggccccgacacuccgaucauuucaccccccgauucauccuaccuguccggcgcuaaccucaaccucucaugccacuccgcauccaaccccagcccgcaauauucguggcgcauuaacggaauuccucagcaacauacccagguccuguucauugcgaagaucaccccuaacaacaacggaaccuacgccugcuuugugucaaaccuggccacugguagaaacaacuccaucgugaaguccauuaccgugucggcgucc

SEQ ID NO: 87 - RNA, 6009 nt, Artificial Sequence
  Synthetic Construct
auggcuagcaccccuggaacccagagccccuucuuccuucugcugcugcugaccgugcugacugucgugacaggcucuggccacgccagcucuacaccuggcggcgagaaagagacaagcgccacccagagaagcagcgugccaagcagcaccgagaagaacgccguguccaugaccagcuccgugcugagcagccacucuccuggcagcggcagcagcacaacacagggccaggaugugacacuggccccugccacagaaccugccucuggaucugccgccaccuggggacaggacgugacaagcgugccagugaccagaccugcccugggcucuacaacacccccugcccacgaugugaccagcgccccugauaacaagccugccccuggaagcacagccccuccagcucauggcgugaccucugccccagauaccagaccagccccaggaucuacagccccacccgcacacggcgugacaagugccccugacacaagacccgcuccaggcucuacugcuccuccugcccauggcgugacaagcgcucccgauacaaggccagcuccuggcuccacagcaccaccagcacauggcgugacaucagcucccgacacuagaccugcucccggaucaaccgcuccaccagcucacggcgugaccagcgcaccugauaccagaccugcucugggaagcaccgccccucccgugcacaaugugacaucugcuuccggcagcgccagcggcucugccucuacacuggugcacaacggcaccagcgccagagccacaacaaccccagccagcaagagcacccccuucagcaucccuagccaccacagcgacaccccuaccacacuggccagccacuccaccaagaccgaugccucuagcacccaccacuccagcgugcccccucugaccagcagcaaccacagcacaagcccccagcugucuaccggcgucucauucuucuuucuguccuuccacaucagcaaccugcaguucaacagcagccuggaagaucccagcaccgacuacuaccaggaacugcagcgggauaucagcgagauguuccugcaaaucuacaagcagggcggcuuccugggccugagcaacaucaaguucagacccggcagcgugguggugcagcugacccuggcuuuccgggaaggcaccaucaacgugcacgacguggaaacccaguucaaccaguacaagaccgaggccgccagccgguacaaccugaccaucuccgauguguccguguccgacgugcccuucccauucucugcccagucuggcgcaggcgugccaggauggggaauugcucugcuggugcucgugugcgugcugguggcccuggccaucguguaucugauugcccuggccgugugccagugccggcggaagaauuacggccagcuggacaucuuccccgccagagacaccuaccaccccaugagcgaguaccccacauaccacacccacggcagauacgugccacccagcuccaccgacagaucccccuacgagaaagugucugccggcaacggcggcagcucccugagcuacacaaauccugccguggccgcugccuccgccaaccugggauccggcacaauccugucugagggcgccaccaacuucagccugcugaaacuggccggcgacguggaacugaacccuggcccuggagcugccccggagccggagaggacccccguuggccagggaucgugggcccauccgggacgcaccaggggaccauccgacaggggauucuguguggugucaccggccaggccagcagaagaggcaaccagccucgagggagcguugucuggaaccagacauucccacccgucggugggccggcagcaccacgcgggaccaccguccacuuccagaccgccacggccaugggacaccccuugcccgccuguguaugccgagacuaaacacuuccuguacucauccggagacaaggaacagcuucggccguccuuccuccugucgucgcucagaccgagccugaccggagcacgcagauugguggaaacuaucuuccuugggucacguccguggaugccagguaccccacggcgccucccgcgccucccacagagauacuggcagaugcggccucuguuccuggaauugcugggaaaccacgcucagugcccguacggaguccugcucaagacucacugcccucugagggcggcggucacuccggcggccggagugugcgcacgggagaagccccagggaagcguggcagcuccggaagaggaggacaccgauccgcgccgccucgugcaacuucugcgccagcacuccucgcccuggcaagucuacggguucguccgcgccugccugcgccgccuggugccgccugggcucugggguucccggcauaacgagcgccgcuuccugagaaauacuaagaaguuuaucucacuuggaaaacaugccaaguugucgcugcaagaacucacguggaagaugucaguccgcgauugcgccuggcugcgccgcucgccgggcgucggguguguuccagcugcagaacaccgccugagagaagaaauucuggccaaauuucugcauuggcugaugucaguguacguggucgagcugcugcgcuccuuuuucuacgucacugagacuaccuuucaaaagaaccgccuguucuucuaccgcaaaucuguguggagcaagcugcagucaaucggcauucgccagcaucugaagagggugcagcugcgggaacuuuccgaggcagaaguccgccagcaccgggaggcccggccggcgcuucucacgucgcgucugagauucaucccaaagcccgacgggcugaggccuaucgucaacauggauuacgucgugggcgcucgcaccuuucgccgugaaaagcgggccgaacgcuugaccucacgggugaaggcccucuucuccgugcugaacuacgagagagcaagacggccuggccugcugggagcuucggugcugggacuggacgauauccaccgggcuuggcggaccuuuguucuccgggugagagcccaagacccuccgccggaacuguacuucgugaagguggcgaucaccggagccuaugauacuauuccgcaagaucgacucaccgaagucaucgccucgaucaucaaaccgcagaacacuuacugcgucaggcgguacgccgugguccagaaggccgcgcauggccacgugagaaaggcguucaagucgcacguguccacucucaccgaccuccagccuuacaugaggcaauucguugcgcauuugcaagagacuucgccccugagagaugcgguggucaucgagcagagcuccagccugaacgaagcgagcagcggucuguuugacguguuccuccgcuucaugugucaucacgcggugcgaaucaggggaaaaucauacgugcagugccagggaaucccacaaggcagcauucugucgacucucuuguguucccuuugcuacggcgauauggaaaacaagcuguucgcugggaucagacgggacggguugcugcucagacugguggacgacuuccugcuggugacuccgcaccucacucacgccaaaaccuuucuccgcacucuggugaggggagugccagaauacggcuguguggucaaucuccggaaaacuguggugaauuucccugucgaggaugaggcacucggaggaaccgcauuuguccaaaugccagcacauggccuguucccauggugcggucugcugcuggacacccgaacucuugaagugcaguccgacuacuccagcuaugcccggacgagcauccgcgccagccucacuuucaaucgcggcuuuaaggccggacgaaacaugcgcagaaagcuuuucggaguccuccggcuuaaaugccauucgcucuuucucgaucuccaagucaauucgcugcagaccgugugcacgaacaucuacaagauccugcugcuccaagccuaccgguuccacgcuugcgugcuucagcugccguuucaccaacagguguggaagaacccgaccuucuuucugcgggucauuagcgauacugccucccuguguuacucaauccucaaggcaaagaacgccggaaugucgcugggugcgaaaggagccgcgggaccucuuccuagcgaagcggugcaguggcucugccaccaggcuuuccuccugaagcugaccaggcacagagugaccuacgucccgcugcugggcucgcugcgcacugcacagacccagcugucuagaaaacuccccggcaccacccugaccgcucuggaagccgccgccaacccagcauugccgucagauuucaagaccaucuuggacggauccggccagugcaccaauuacgcccugcugaagcuggccggcgacguggaaucuaacccuggcccugaaucgccaagcgcacccccucaucgguggugcaucccuuggcaacgccuccuccugaccgccucacugcugacuuucuggaacccgccgaccaccgcaaagcugaccauugagagcacucccuucaacguggcugaggggaaggaggugcugcuccuggugcacaaucugccccagcaccuguucggguacuccugguacaagggagaacgcguggacgggaaccggcagaucauaggcuacgucaucggaacccagcaggccacacccgguccagcguacagcggccgggagauuaucuacccgaacgccucccugcugauccaaaacaucauccagaacgacaccgguuucuacacucugcacgugauuaagucagaucuggucaacgaagaggccaccggccaauucaggguguaccccgaacucccuaagccguucaucaccucgaacaacagcaacccggucgaggaugaagaugcgguggccuugacgugcgaaccugagauccagaacaccaccuacuuguggugggugaacaaucagagccugccagucuccccacgacuccagcugucgaacgacaacaggacccugacuuugcuguccgugacucggaacgacgugggcccuuaugaaugcgguauccagaacaagcuguccguggaccacagcgacccugugauccugaacguccuuuacgggccggacgaccccaccauuuccccgucguacacuuacuaccggccgggcgugaaccugucccugucgugccacgcugccuccaauccgccggcccaguacuccuggcucaucgacggaaacauccagcagcacacccaagaacuguucaucuccaacauuaccgagaaaaacucgggacuuuacaccugucaagccaacaauuccgccagcggccacucccgcaccacugucaaaacuaucacuguguccgccgaacucccgaagcccagcaucagcuccaacaacucgaagcccguggaggauaaggacgcugucgcguucaccugugaaccagaggcacagaauaccaccuaccuuuggugggucaacggacagucccugccugucucaccgagacugcagcugucaaacgggaauaggacucugaccuuguuuaacgucacccggaacgacgcccgggccuacgugugcggcauccagaacuccgugagcgcaaaccggucugacccagugacccuggaugugcuguacggccccgacacuccgaucauuucaccccccgauucauccuaccuguccggcgcuaaccucaaccucucaugccacuccgcauccaaccccagcccgcaauauucguggcgcauuaacggaauuccucagcaacauacccagguccuguucauugcgaagaucaccccuaacaacaacggaaccuacgccugcuuugugucaaaccuggccacugguagaaacaacuccaucgugaaguccauuaccgugucggcguccggaacuuccccgggccugagcgccggcgccaccgugggaauuaugaucggcgugcucgugggaguggcccugauc

SEQ ID NO: 88 - RNA, 6003 nt, Artificial Sequence
  Synthetic Construct
auggcuagcgaaucgccaagcgcacccccucaucgguggugcaucccuuggcaacgccuccuccugaccgccucacugcugacuuucuggaacccgccgaccaccgcaaagcugaccauugagagcacucccuucaacguggcugaggggaaggaggugcugcuccuggugcacaaucugccccagcaccuguucggguacuccugguacaagggagaacgcguggacgggaaccggcagaucauaggcuacgucaucggaacccagcaggccacacccgguccagcguacagcggccgggagauuaucuacccgaacgccucccugcugauccaaaacaucauccagaacgacaccgguuucuacacucugcacgugauuaagucagaucuggucaacgaagaggccaccggccaauucaggguguaccccgaacucccuaagccguucaucaccucgaacaacagcaacccggucgaggaugaagaugcgguggccuugacgugcgaaccugagauccagaacaccaccuacuuguggugggugaacaaucagagccugccagucuccccacgacuccagcugucgaacgacaacaggacccugacuuugcuguccgugacucggaacgacgugggcccuuaugaaugcgguauccagaacaagcuguccguggaccacagcgacccugugauccugaacguccuuuacgggccggacgaccccaccauuuccccgucguacacuuacuaccggccgggcgugaaccugucccugucgugccacgcugccuccaauccgccggcccaguacuccuggcucaucgacggaaacauccagcagcacacccaagaacuguucaucuccaacauuaccgagaaaaacucgggacuuuacaccugucaagccaacaauuccgccagcggccacucccgcaccacugucaaaacuaucacuguguccgccgaacucccgaagcccagcaucagcuccaacaacucgaagcccguggaggauaaggacgcugucgcguucaccugugaaccagaggcacagaauaccaccuaccuuuggugggucaacggacagucccugccugucucaccgagacugcagcugucaaacgggaauaggacucugaccuuguuuaacgucacccggaacgacgcccgggccuacgugugcggcauccagaacuccgugagcgcaaaccggucugacccagugacccuggaugugcuguacggccccgacacuccgaucauuucaccccccgauucauccuaccuguccggcgcuaaccucaaccucucaugccacuccgcauccaaccccagcccgcaauauucguggcgcauuaacggaauuccucagcaacauacccagguccuguucauugcgaagaucaccccuaacaacaacggaaccuacgccugcuuugugucaaaccuggccacugguagaaacaacuccaucgugaaguccauuaccgugucggcguccggaacuuccccgggccugagcgccggcgccaccgugggaauuaugaucggcgugcucgugggaguggcccugaucggauccggcgagggcagaggcagccugcugacauguggcgacguggaagagaacccuggccccaccccuggaacccagagccccuucuuccuucugcugcugcugaccgugcugacugucgugacaggcucuggccacgccagcucuacaccuggcggcgagaaagagacaagcgccacccagagaagcagcgugccaagcagcaccgagaagaacgccguguccaugaccagcuccgugcugagcagccacucuccuggcagcggcagcagcacaacacagggccaggaugugacacuggccccugccacagaaccugccucuggaucugccgccaccuggggacaggacgugacaagcgugccagugaccagaccugcccugggcucuacaacacccccugcccacgaugugaccagcgccccugauaacaagccugccccuggaagcacagccccuccagcucauggcgugaccucugccccagauaccagaccagccccaggaucuacagccccacccgcacacggcgugacaagugccccugacacaagacccgcuccaggcucuacugcuccuccugcccauggcgugacaagcgcucccgauacaaggccagcuccuggcuccacagcaccaccagcacauggcgugacaucagcucccgacacuagaccugcucccggaucaaccgcuccaccagcucacggcgugaccagcgcaccugauaccagaccugcucugggaagcaccgccccucccgugcacaaugugacaucugcuuccggcagcgccagcggcucugccucuacacuggugcacaacggcaccagcgccagagccacaacaaccccagccagcaagagcacccccuucagcaucccuagccaccacagcgacaccccuaccacacuggccagccacuccaccaagaccgaugccucuagcacccaccacuccagcgugcccccucugaccagcagcaaccacagcacaagcccccagcugucuaccggcgucucauucuucuuucuguccuuccacaucagcaaccugcaguucaacagcagccuggaagaucccagcaccgacuacuaccaggaacugcagcgggauaucagcgagauguuccugcaaaucuacaagcagggcggcuuccugggccugagcaacaucaaguucagacccggcagcgugguggugcagcugacccuggcuuuccgggaaggcaccaucaacgugcacgacguggaaacccaguucaaccaguacaagaccgaggccgccagccgguacaaccugaccaucuccgauguguccguguccgacgugcccuucccauucucugcccagucuggcgcaggcgugccaggauggggaauugcucugcuggugcucgugugcgugcugguggcccuggccaucguguaucugauugcccuggccgugugccagugccggcggaagaauuacggccagcuggacaucuuccccgccagagacaccuaccaccccaugagcgaguaccccacauaccacacccacggcagauacgugccacccagcuccaccgacagaucccccuacgagaaagugucugccggcaacggcggcagcucccugagcuacacaaauccugccguggccgcugccuccgccaaccugggauccggcacaauccugucugagggcgccaccaacuucagccugcugaaacuggccggcgacguggaacugaacccuggcccuggagcugccccggagccggagaggacccccguuggccagggaucgugggcccauccgggacgcaccaggggaccauccgacaggggauucuguguggugucaccggccaggccagcagaagaggcaaccagccucgagggagcguugucuggaaccagacauucccacccgucggugggccggcagcaccacgcgggaccaccguccacuuccagaccgccacggccaugggacaccccuugcccgccuguguaugccgagacuaaacacuuccuguacucauccggagacaaggaacagcuucggccguccuuccuccugucgucgcucagaccgagccugaccggagcacgcagauugguggaaacuaucuuccuugggucacguccguggaugccagguaccccacggcgccucccgcgccucccacagagauacuggcagaugcggccucuguuccuggaauugcugggaaaccacgcucagugcccguacggaguccugcucaagacucacugcccucugagggcggcggucacuccggcggccggagugugcgcacgggagaagccccagggaagcguggcagcuccggaagaggaggacaccgauccgcgccgccucgugcaacuucugcgccagcacuccucgcccuggcaagucuacggguucguccgcgccugccugcgccgccuggugccgccugggcucugggguucccggcauaacgagcgccgcuuccugagaaauacuaagaaguuuaucucacuuggaaaacaugccaaguugucgcugcaagaacucacguggaagaugucaguccgcgauugcgccuggcugcgccgcucgccgggcgucggguguguuccagcugcagaacaccgccugagagaagaaauucuggccaaauuucugcauuggcugaugucaguguacguggucgagcugcugcgcuccuuuuucuacgucacugagacuaccuuucaaaagaaccgccuguucuucuaccgcaaaucuguguggagcaagcugcagucaaucggcauucgccagcaucugaagagggugcagcugcgggaacuuuccgaggcagaaguccgccagcaccgggaggcccggccggcgcuucucacgucgcgucugagauucaucccaaagcccgacgggcugaggccuaucgucaacauggauuacgucgugggcgcucgcaccuuucgccgugaaaagcgggccgaacgcuugaccucacgggugaaggcccucuucuccgugcugaacuacgagagagcaagacggccuggccugcugggagcuucggugcugggacuggacgauauccaccgggcuuggcggaccuuuguucuccgggugagagcccaagacccuccgccggaacuguacuucgugaagguggcgaucaccggagccuaugauacuauuccgcaagaucgacucaccgaagucaucgccucgaucaucaaaccgcagaacacuuacugcgucaggcgguacgccgugguccagaaggccgcgcauggccacgugagaaaggcguucaagucgcacguguccacucucaccgaccuccagccuuacaugaggcaauucguugcgcauuugcaagagacuucgccccugagagaugcgguggucaucgagcagagcuccagccugaacgaagcgagcagcggucuguuugacguguuccuccgcuucaugugucaucacgcggugcgaaucaggggaaaaucauacgugcagugccagggaaucccacaaggcagcauucugucgacucucuuguguucccuuugcuacggcgauauggaaaacaagcuguucgcugggaucagacgggacggguugcugcucagacugguggacgacuuccugcuggugacuccgcaccucacucacgccaaaaccuuucuccgcacucuggugaggggagugccagaauacggcuguguggucaaucuccggaaaacuguggugaauuucccugucgaggaugaggcacucggaggaaccgcauuuguccaaaugccagcacauggccuguucccauggugcggucugcugcuggacacccgaacucuugaagugcaguccgacuacuccagcuaugcccggacgagcauccgcgccagccucacuuucaaucgcggcuuuaaggccggacgaaacaugcgcagaaagcuuuucggaguccuccggcuuaaaugccauucgcucuuucucgaucuccaagucaauucgcugcagaccgugugcacgaacaucuacaagauccugcugcuccaagccuaccgguuccacgcuugcgugcuucagcugccguuucaccaacagguguggaagaacccgaccuucuuucugcgggucauuagcgauacugccucccuguguuacucaauccucaaggcaaagaacgccggaaugucgcugggugcgaaaggagccgcgggaccucuuccuagcgaagcggugcaguggcucugccaccaggcuuuccuccugaagcugaccaggcacagagugaccuacgucccgcugcugggcucgcugcgcacugcacagacccagcugucuagaaaacuccccggcaccacccugaccgcucuggaagccgccgccaacccagcauugccgucagauuucaagaccaucuuggac

SEQ ID NO: 89 - RNA, 6024 nt, Artificial Sequence
  Synthetic Construct
auggcuagcggagcugccccggagccggagaggacccccguuggccagggaucgugggcccauccgggacgcaccaggggaccauccgacaggggauucuguguggugucaccggccaggccagcagaagaggcaaccagccucgagggagcguugucuggaaccagacauucccacccgucggugggccggcagcaccacgcgggaccaccguccacuuccagaccgccacggccaugggacaccccuugcccgccuguguaugccgagacuaaacacuuccuguacucauccggagacaaggaacagcuucggccguccuuccuccugucgucgcucagaccgagccugaccggagcacgcagauugguggaaacuaucuuccuugggucacguccguggaugccagguaccccacggcgccucccgcgccucccacagagauacuggcagaugcggccucuguuccuggaauugcugggaaaccacgcucagugcccguacggaguccugcucaagacucacugcccucugagggcggcggucacuccggcggccggagugugcgcacgggagaagccccagggaagcguggcagcuccggaagaggaggacaccgauccgcgccgccucgugcaacuucugcgccagcacuccucgcccuggcaagucuacggguucguccgcgccugccugcgccgccuggugccgccugggcucugggguucccggcauaacgagcgccgcuuccugagaaauacuaagaaguuuaucucacuuggaaaacaugccaaguugucgcugcaagaacucacguggaagaugucaguccgcgauugcgccuggcugcgccgcucgccgggcgucggguguguuccagcugcagaacaccgccugagagaagaaauucuggccaaauuucugcauuggcugaugucaguguacguggucgagcugcugcgcuccuuuuucuacgucacugagacuaccuuucaaaagaaccgccuguucuucuaccgcaaaucuguguggagcaagcugcagucaaucggcauucgccagcaucugaagagggugcagcugcgggaacuuuccgaggcagaaguccgccagcaccgggaggcccggccggcgcuucucacgucgcgucugagauucaucccaaagcccgacgggcugaggccuaucgucaacauggauuacgucgugggcgcucgcaccuuucgccgugaaaagcgggccgaacgcuugaccucacgggugaaggcccucuucuccgugcugaacuacgagagagcaagacggccuggccugcugggagcuucggugcugggacuggacgauauccaccgggcuuggcggaccuuuguucuccgggugagagcccaagacccuccgccggaacuguacuucgugaagguggcgaucaccggagccuaugauacuauuccgcaagaucgacucaccgaagucaucgccucgaucaucaaaccgcagaacacuuacugcgucaggcgguacgccgugguccagaaggccgcgcauggccacgugagaaaggcguucaagucgcacguguccacucucaccgaccuccagccuuacaugaggcaauucguugcgcauuugcaagagacuucgccccugagagaugcgguggucaucgagcagagcuccagccugaacgaagcgagcagcggucuguuugacguguuccuccgcuucaugugucaucacgcggugcgaaucaggggaaaaucauacgugcagugccagggaaucccacaaggcagcauucugucgacucucuuguguucccuuugcuacggcgauauggaaaacaagcuguucgcugggaucagacgggacggguugcugcucagacugguggacgacuuccugcuggugacuccgcaccucacucacgccaaaaccuuucuccgcacucuggugaggggagugccagaauacggcuguguggucaaucuccggaaaacuguggugaauuucccugucgaggaugaggcacucggaggaaccgcauuuguccaaaugccagcacauggccuguucccauggugcggucugcugcuggacacccgaacucuugaagugcaguccgacuacuccagcuaugcccggacgagcauccgcgccagccucacuuucaaucgcggcuuuaaggccggacgaaacaugcgcagaaagcuuuucggaguccuccggcuuaaaugccauucgcucuuucucgaucuccaagucaauucgcugcagaccgugugcacgaacaucuacaagauccugcugcuccaagccuaccgguuccacgcuugcgugcuucagcugccguuucaccaacagguguggaagaacccgaccuucuuucugcgggucauuagcgauacugccucccuguguuacucaauccucaaggcaaagaacgccggaaugucgcugggugcgaaaggagccgcgggaccucuuccuagcgaagcggugcaguggcucugccaccaggcuuuccuccugaagcugaccaggcacagagugaccuacgucccgcugcugggcucgcugcgcacugcacagacccagcugucuagaaaacuccccggcaccacccugaccgcucuggaagccgccgccaacccagcauugccgucagauuucaagaccaucuuggacggauccggcacaauccugucugagggcgccaccaacuucagccugcugaaacuggccggcgacguggaacugaacccuggcccuaccccuggaacccagagccccuucuuccuucugcugcugcugaccgugcugacugucgugacaggcucuggccacgccagcucuacaccuggcggcgagaaagagacaagcgccacccagagaagcagcgugccaagcagcaccgagaagaacgccguguccaugaccagcuccgugcugagcagccacucuccuggcagcggcagcagcacaacacagggccaggaugugacacuggccccugccacagaaccugccucuggaucugccgccaccuggggacaggacgugacaagcgugccagugaccagaccugcccugggcucuacaacacccccugcccacgaugugaccagcgccccugauaacaagccugccccuggaagcacagccccuccagcucauggcgugaccucugccccagauaccagaccagccccaggaucuacagccccacccgcacacggcgugacaagugccccugacacaagacccgcuccaggcucuacugcuccuccugcccauggcgugacaagcgcucccgauacaaggccagcuccuggcuccacagcaccaccagcacauggcgugacaucagcucccgacacuagaccugcucccggaucaaccgcuccaccagcucacggcgugaccagcgcaccugauaccagaccugcucugggaagcaccgccccucccgugcacaaugugacaucugcuuccggcagcgccagcggcucugccucuacacuggugcacaacggcaccagcgccagagccacaacaaccccagccagcaagagcacccccuucagcaucccuagccaccacagcgacaccccuaccacacuggccagccacuccaccaagaccgaugccucuagcacccaccacuccagcgugcccccucugaccagcagcaaccacagcacaagcccccagcugucuaccggcgucucauucuucuuucuguccuuccacaucagcaaccugcaguucaacagcagccuggaagaucccagcaccgacuacuaccaggaacugcagcgggauaucagcgagauguuccugcaaaucuacaagcagggcggcuuccugggccugagcaacaucaaguucagacccggcagcgugguggugcagcugacccuggcuuuccgggaaggcaccaucaacgugcacgacguggaaacccaguucaaccaguacaagaccgaggccgccagccgguacaaccugaccaucuccgauguguccguguccgacgugcccuucccauucucugcccagucuggcgcaggcgugccaggauggggaauugcucugcuggugcucgugugcgugcugguggcccuggccaucguguaucugauugcccuggccgugugccagugccggcggaagaauuacggccagcuggacaucuuccccgccagagacaccuaccaccccaugagcgaguaccccacauaccacacccacggcagauacgugccacccagcuccaccgacagaucccccuacgagaaagugucugccggcaacggcggcagcucccugagcuacacaaauccugccguggccgcugccuccgccaaccugggauccggcagaaucuucaacgcccacuacgccggcuacuucgccgaccugcugauccacgacaucgagacaaacccuggccccgaaucgccaagcgcacccccucaucgguggugcaucccuuggcaacgccuccuccugaccgccucacugcugacuuucuggaacccgccgaccaccgcaaagcugaccauugagagcacucccuucaacguggcugaggggaaggaggugcugcuccuggugcacaaucugccccagcaccuguucggguacuccugguacaagggagaacgcguggacgggaaccggcagaucauaggcuacgucaucggaacccagcaggccacacccgguccagcguacagcggccgggagauuaucuacccgaacgccucccugcugauccaaaacaucauccagaacgacaccgguuucuacacucugcacgugauuaagucagaucuggucaacgaagaggccaccggccaauucaggguguaccccgaacucccuaagccguucaucaccucgaacaacagcaacccggucgaggaugaagaugcgguggccuugacgugcgaaccugagauccagaacaccaccuacuuguggugggugaacaaucagagccugccagucuccccacgacuccagcugucgaacgacaacaggacccugacuuugcuguccgugacucggaacgacgugggcccuuaugaaugcgguauccagaacaagcuguccguggaccacagcgacccugugauccugaacguccuuuacgggccggacgaccccaccauuuccccgucguacacuuacuaccggccgggcgugaaccugucccugucgugccacgcugccuccaauccgccggcccaguacuccuggcucaucgacggaaacauccagcagcacacccaagaacuguucaucuccaacauuaccgagaaaaacucgggacuuuacaccugucaagccaacaauuccgccagcggccacucccgcaccacugucaaaacuaucacuguguccgccgaacucccgaagcccagcaucagcuccaacaacucgaagcccguggaggauaaggacgcugucgcguucaccugugaaccagaggcacagaauaccaccuaccuuuggugggucaacggacagucccugccugucucaccgagacugcagcugucaaacgggaauaggacucugaccuuguuuaacgucacccggaacgacgcccgggccuacgugugcggcauccagaacuccgugagcgcaaaccggucugacccagugacccuggaugugcuguacggccccgacacuccgaucauuucaccccccgauucauccuaccuguccggcgcuaaccucaaccucucaugccacuccgcauccaaccccagcccgcaauauucguggcgcauuaacggaauuccucagcaacauacccagguccuguucauugcgaagaucaccccuaacaacaacggaaccuacgccugcuuugugucaaaccuggccacugguagaaacaacuccaucgugaaguccauuaccgugucggcguccggaacuuccccgggccugagcgccggcgccaccgugggaauuaugaucggcgugcucgugggaguggcccugauc

SEQ ID NO: 90 - RNA, 5988 nt, Artificial Sequence
  Synthetic Construct
auggcuagcggagcugccccggagccggagaggacccccguuggccagggaucgugggcccauccgggacgcaccaggggaccauccgacaggggauucuguguggugucaccggccaggccagcagaagaggcaaccagccucgagggagcguugucuggaaccagacauucccacccgucggugggccggcagcaccacgcgggaccaccguccacuuccagaccgccacggccaugggacaccccuugcccgccuguguaugccgagacuaaacacuuccuguacucauccggagacaaggaacagcuucggccguccuuccuccugucgucgcucagaccgagccugaccggagcacgcagauugguggaaacuaucuuccuugggucacguccguggaugccagguaccccacggcgccucccgcgccucccacagagauacuggcagaugcggccucuguuccuggaauugcugggaaaccacgcucagugcccguacggaguccugcucaagacucacugcccucugagggcggcggucacuccggcggccggagugugcgcacgggagaagccccagggaagcguggcagcuccggaagaggaggacaccgauccgcgccgccucgugcaacuucugcgccagcacuccucgcccuggcaagucuacggguucguccgcgccugccugcgccgccuggugccgccugggcucugggguucccggcauaacgagcgccgcuuccugagaaauacuaagaaguuuaucucacuuggaaaacaugccaaguugucgcugcaagaacucacguggaagaugucaguccgcgauugcgccuggcugcgccgcucgccgggcgucggguguguuccagcugcagaacaccgccugagagaagaaauucuggccaaauuucugcauuggcugaugucaguguacguggucgagcugcugcgcuccuuuuucuacgucacugagacuaccuuucaaaagaaccgccuguucuucuaccgcaaaucuguguggagcaagcugcagucaaucggcauucgccagcaucugaagagggugcagcugcgggaacuuuccgaggcagaaguccgccagcaccgggaggcccggccggcgcuucucacgucgcgucugagauucaucccaaagcccgacgggcugaggccuaucgucaacauggauuacgucgugggcgcucgcaccuuucgccgugaaaagcgggccgaacgcuugaccucacgggugaaggcccucuucuccgugcugaacuacgagagagcaagacggccuggccugcugggagcuucggugcugggacuggacgauauccaccgggcuuggcggaccuuuguucuccgggugagagcccaagacccuccgccggaacuguacuucgugaagguggcgaucaccggagccuaugauacuauuccgcaagaucgacucaccgaagucaucgccucgaucaucaaaccgcagaacacuuacugcgucaggcgguacgccgugguccagaaggccgcgcauggccacgugagaaaggcguucaagucgcacguguccacucucaccgaccuccagccuuacaugaggcaauucguugcgcauuugcaagagacuucgccccugagagaugcgguggucaucgagcagagcuccagccugaacgaagcgagcagcggucuguuugacguguuccuccgcuucaugugucaucacgcggugcgaaucaggggaaaaucauacgugcagugccagggaaucccacaaggcagcauucugucgacucucuuguguucccuuugcuacggcgauauggaaaacaagcuguucgcugggaucagacgggacggguugcugcucagacugguggacgacuuccugcuggugacuccgcaccucacucacgccaaaaccuuucuccgcacucuggugaggggagugccagaauacggcuguguggucaaucuccggaaaacuguggugaauuucccugucgaggaugaggcacucggaggaaccgcauuuguccaaaugccagcacauggccuguucccauggugcggucugcugcuggacacccgaacucuugaagugcaguccgacuacuccagcuaugcccggacgagcauccgcgccagccucacuuucaaucgcggcuuuaaggccggacgaaacaugcgcagaaagcuuuucggaguccuccggcuuaaaugccauucgcucuuucucgaucuccaagucaauucgcugcagaccgugugcacgaacaucuacaagauccugcugcuccaagccuaccgguuccacgcuugcgugcuucagcugccguuucaccaacagguguggaagaacccgaccuucuuucugcgggucauuagcgauacugccucccuguguuacucaauccucaaggcaaagaacgccggaaugucgcugggugcgaaaggagccgcgggaccucuuccuagcgaagcggugcaguggcucugccaccaggcuuuccuccugaagcugaccaggcacagagugaccuacgucccgcugcugggcucgcugcgcacugcacagacccagcugucuagaaaacuccccggcaccacccugaccgcucuggaagccgccgccaacccagcauugccgucagauuucaagaccaucuuggacggauccggccagugcaccaauuacgcccugcugaagcuggccggcgacguggaaucuaacccuggcccugaaucgccaagcgcacccccucaucgguggugcaucccuuggcaacgccuccuccugaccgccucacugcugacuuucuggaacccgccgaccaccgcaaagcugaccauugagagcacucccuucaacguggcugaggggaaggaggugcugcuccuggugcacaaucugccccagcaccuguucggguacuccugguacaagggagaacgcguggacgggaaccggcagaucauaggcuacgucaucggaacccagcaggccacacccgguccagcguacagcggccgggagauuaucuacccgaacgccucccugcugauccaaaacaucauccagaacgacaccgguuucuacacucugcacgugauuaagucagaucuggucaacgaagaggccaccggccaauucaggguguaccccgaacucccuaagccguucaucaccucgaacaacagcaacccggucgaggaugaagaugcgguggccuugacgugcgaaccugagauccagaacaccaccuacuuguggugggugaacaaucagagccugccagucuccccacgacuccagcugucgaacgacaacaggacccugacuuugcuguccgugacucggaacgacgugggcccuuaugaaugcgguauccagaacaagcuguccguggaccacagcgacccugugauccugaacguccuuuacgggccggacgaccccaccauuuccccgucguacacuuacuaccggccgggcgugaaccugucccugucgugccacgcugccuccaauccgccggcccaguacuccuggcucaucgacggaaacauccagcagcacacccaagaacuguucaucuccaacauuaccgagaaaaacucgggacuuuacaccugucaagccaacaauuccgccagcggccacucccgcaccacugucaaaacuaucacuguguccgccgaacucccgaagcccagcaucagcuccaacaacucgaagcccguggaggauaaggacgcugucgcguucaccugugaaccagaggcacagaauaccaccuaccuuuggugggucaacggacagucccugccugucucaccgagacugcagcugucaaacgggaauaggacucugaccuuguuuaacgucacccggaacgacgcccgggccuacgugugcggcauccagaacuccgugagcgcaaaccggucugacccagugacccuggaugugcuguacggccccgacacuccgaucauuucaccccccgauucauccuaccuguccggcgcuaaccucaaccucucaugccacuccgcauccaaccccagcccgcaauauucguggcgcauuaacggaauuccucagcaacauacccagguccuguucauugcgaagaucaccccuaacaacaacggaaccuacgccugcuuugugucaaaccuggccacugguagaaacaacuccaucgugaaguccauuaccgugucggcguccggaacuuccccgggccugagcgccggcgccaccgugggaauuaugaucggcgugcucgugggaguggcccugaucggauccggcgagggcagaggcagccugcugacauguggcgacguggaagagaacccuggccccaccccuggaacccagagccccuucuuccuucugcugcugcugaccgugcugacugucgugacaggcucuggccacgccagcucuacaccuggcggcgagaaagagacaagcgccacccagagaagcagcgugccaagcagcaccgagaagaacgccguguccaugaccagcuccgugcugagcagccacucuccuggcagcggcagcagcacaacacagggccaggaugugacacuggccccugccacagaaccugccucuggaucugccgccaccuggggacaggacgugacaagcgugccagugaccagaccugcccugggcucuacaacacccccugcccacgaugugaccagcgccccugauaacaagccugccccuggaagcacagccccuccagcucauggcgugaccucugccccagauaccagaccagccccaggaucuacagccccacccgcacacggcgugacaagugccccugacacaagacccgcuccaggcucuacugcuccuccugcccauggcgugacaagcgcucccgauacaaggccagcuccuggcuccacagcaccaccagcacauggcgugacaucagcucccgacacuagaccugcucccggaucaaccgcuccaccagcucacggcgugaccagcgcaccugauaccagaccugcucugggaagcaccgccccucccgugcacaaugugacaucugcuuccggcagcgccagcggcucugccucuacacuggugcacaacggcaccagcgccagagccacaacaaccccagccagcaagagcacccccuucagcaucccuagccaccacagcgacaccccuaccacacuggccagccacuccaccaagaccgaugccucuagcacccaccacuccagcgugcccccucugaccagcagcaaccacagcacaagcccccagcugucuaccggcgucucauucuucuuucuguccuuccacaucagcaaccugcaguucaacagcagccuggaagaucccagcaccgacuacuaccaggaacugcagcgggauaucagcgagauguuccugcaaaucuacaagcagggcggcuuccugggccugagcaacaucaaguucagacccggcagcgugguggugcagcugacccuggcuuuccgggaaggcaccaucaacgugcacgacguggaaacccaguucaaccaguacaagaccgaggccgccagccgguacaaccugaccaucuccgauguguccguguccgacgugcccuucccauucucugcccagucuggcgcaggcgugccaggauggggaauugcucugcuggugcucgugugcgugcugguggcccuggccaucguguaucugauugcccuggccgugugccagugccggcggaagaauuacggccagcuggacaucuuccccgccagagacaccuaccaccccaugagcgaguaccccacauaccacacccacggcagauacgugccacccagcuccaccgacagaucccccuacgagaaagugucugccggcaacggcggcagcucccugagcuacacaaauccugccguggccgcugccuccgccaaccug

SEQ ID NO: 91 - RNA, 5829 nt, Artificial Sequence
  Synthetic Construct
auggcuagcaccccuggaacccagagccccuucuuccuucugcugcugcugaccgugcugacugucgugacaggcucuggccacgccagcucuacaccuggcggcgagaaagagacaagcgccacccagagaagcagcgugccaagcagcaccgagaagaacgccguguccaugaccagcuccgugcugagcagccacucuccuggcagcggcagcagcacaacacagggccaggaugugacacuggccccugccacagaaccugccucuggaucugccgccaccuggggacaggacgugacaagcgugccagugaccagaccugcccugggcucuacaacacccccugcccacgaugugaccagcgccccugauaacaagccugccccuggaagcacagccccuccagcucauggcgugaccucugccccagauaccagaccagccccaggaucuacagccccacccgcacacggcgugacaagugccccugacacaagacccgcuccaggcucuacugcuccuccugcccauggcgugacaagcgcucccgauacaaggccagcuccuggcuccacagcaccaccagcacauggcgugacaucagcucccgacacuagaccugcucccggaucaaccgcuccaccagcucacggcgugaccagcgcaccugauaccagaccugcucugggaagcaccgccccucccgugcacaaugugacaucugcuuccggcagcgccagcggcucugccucuacacuggugcacaacggcaccagcgccagagccacaacaaccccagccagcaagagcacccccuucagcaucccuagccaccacagcgacaccccuaccacacuggccagccacuccaccaagaccgaugccucuagcacccaccacuccagcgugcccccucugaccagcagcaaccacagcacaagcccccagcugucuaccggcgucucauucuucuuucuguccuuccacaucagcaaccugcaguucaacagcagccuggaagaucccagcaccgacuacuaccaggaacugcagcgggauaucagcgagauguuccugcaaaucuacaagcagggcggcuuccugggccugagcaacaucaaguucagacccggcagcgugguggugcagcugacccuggcuuuccgggaaggcaccaucaacgugcacgacguggaaacccaguucaaccaguacaagaccgaggccgccagccgguacaaccugaccaucuccgauguguccguguccgacgugcccuucccauucucugcccagucuggcgcaggcgugccaggauggggaauugcucugcuggugcucgugugcgugcugguggcccuggccaucguguaucugauugcccuggccgugugccagugccggcggaagaauuacggccagcuggacaucuuccccgccagagacaccuaccaccccaugagcgaguaccccacauaccacacccacggcagauacgugccacccagcuccaccgacagaucccccuacgagaaagugucugccggcaacggcggcagcucccugagcuacacaaauccugccguggccgcugccuccgccaaccugggauccggcagaaucuucaacgcccacuacgccggcuacuucgccgaccugcugauccacgacaucgagacaaacccuggccccaagcugaccauugagagcacucccuucaacguggcugaggggaaggaggugcugcuccuggugcacaaucugccccagcaccuguucggguacuccugguacaagggagaacgcguggacgggaaccggcagaucauaggcuacgucaucggaacccagcaggccacacccgguccagcguacagcggccgggagauuaucuacccgaacgccucccugcugauccaaaacaucauccagaacgacaccgguuucuacacucugcacgugauuaagucagaucuggucaacgaagaggccaccggccaauucaggguguaccccgaacucccuaagccguucaucaccucgaacaacagcaacccggucgaggaugaagaugcgguggccuugacgugcgaaccugagauccagaacaccaccuacuuguggugggugaacaaucagagccugccagucuccccacgacuccagcugucgaacgacaacaggacccugacuuugcuguccgugacucggaacgacgugggcccuuaugaaugcgguauccagaacaagcuguccguggaccacagcgacccugugauccugaacguccuuuacgggccggacgaccccaccauuuccccgucguacacuuacuaccggccgggcgugaaccugucccugucgugccacgcugccuccaauccgccggcccaguacuccuggcucaucgacggaaacauccagcagcacacccaagaacuguucaucuccaacauuaccgagaaaaacucgggacuuuacaccugucaagccaacaauuccgccagcggccacucccgcaccacugucaaaacuaucacuguguccgccgaacucccgaagcccagcaucagcuccaacaacucgaagcccguggaggauaaggacgcugucgcguucaccugugaaccagaggcacagaauaccaccuaccuuuggugggucaacggacagucccugccugucucaccgagacugcagcugucaaacgggaauaggacucugaccuuguuuaacgucacccggaacgacgcccgggccuacgugugcggcauccagaacuccgugagcgcaaaccggucugacccagugacccuggaugugcuguacggccccgacacuccgaucauuucaccccccgauucauccuaccuguccggcgcuaaccucaaccucucaugccacuccgcauccaaccccagcccgcaauauucguggcgcauuaacggaauuccucagcaacauacccagguccuguucauugcgaagaucaccccuaacaacaacggaaccuacgccugcuuugugucaaaccuggccacugguagaaacaacuccaucgugaaguccauuaccgugucggcguccggauccggcgagggcagaggcagccugcugacauguggcgacguggaagagaacccuggccccggagcugccccggagccggagaggacccccguuggccagggaucgugggcccauccgggacgcaccaggggaccauccgacaggggauucuguguggugucaccggccaggccagcagaagaggcaaccagccucgagggagcguugucuggaaccagacauucccacccgucggugggccggcagcaccacgcgggaccaccguccacuuccagaccgccacggccaugggacaccccuugcccgccuguguaugccgagacuaaacacuuccuguacucauccggagacaaggaacagcuucggccguccuuccuccugucgucgcucagaccgagccugaccggagcacgcagauugguggaaacuaucuuccuugggucacguccguggaugccagguaccccacggcgccucccgcgccucccacagagauacuggcagaugcggccucuguuccuggaauugcugggaaaccacgcucagugcccguacggaguccugcucaagacucacugcccucugagggcggcggucacuccggcggccggagugugcgcacgggagaagccccagggaagcguggcagcuccggaagaggaggacaccgauccgcgccgccucgugcaacuucugcgccagcacuccucgcccuggcaagucuacggguucguccgcgccugccugcgccgccuggugccgccugggcucugggguucccggcauaacgagcgccgcuuccugagaaauacuaagaaguuuaucucacuuggaaaacaugccaaguugucgcugcaagaacucacguggaagaugucaguccgcgauugcgccuggcugcgccgcucgccgggcgucggguguguuccagcugcagaacaccgccugagagaagaaauucuggccaaauuucugcauuggcugaugucaguguacguggucgagcugcugcgcuccuuuuucuacgucacugagacuaccuuucaaaagaaccgccuguucuucuaccgcaaaucuguguggagcaagcugcagucaaucggcauucgccagcaucugaagagggugcagcugcgggaacuuuccgaggcagaaguccgccagcaccgggaggcccggccggcgcuucucacgucgcgucugagauucaucccaaagcccgacgggcugaggccuaucgucaacauggauuacgucgugggcgcucgcaccuuucgccgugaaaagcgggccgaacgcuugaccucacgggugaaggcccucuucuccgugcugaacuacgagagagcaagacggccuggccugcugggagcuucggugcugggacuggacgauauccaccgggcuuggcggaccuuuguucuccgggugagagcccaagacccuccgccggaacuguacuucgugaagguggcgaucaccggagccuaugauacuauuccgcaagaucgacucaccgaagucaucgccucgaucaucaaaccgcagaacacuuacugcgucaggcgguacgccgugguccagaaggccgcgcauggccacgugagaaaggcguucaagucgcacguguccacucucaccgaccuccagccuuacaugaggcaauucguugcgcauuugcaagagacuucgccccugagagaugcgguggucaucgagcagagcuccagccugaacgaagcgagcagcggucuguuugacguguuccuccgcuucaugugucaucacgcggugcgaaucaggggaaaaucauacgugcagugccagggaaucccacaaggcagcauucugucgacucucuuguguucccuuugcuacggcgauauggaaaacaagcuguucgcugggaucagacgggacggguugcugcucagacugguggacgacuuccugcuggugacuccgcaccucacucacgccaaaaccuuucuccgcacucuggugaggggagugccagaauacggcuguguggucaaucuccggaaaacuguggugaauuucccugucgaggaugaggcacucggaggaaccgcauuuguccaaaugccagcacauggccuguucccauggugcggucugcugcuggacacccgaacucuugaagugcaguccgacuacuccagcuaugcccggacgagcauccgcgccagccucacuuucaaucgcggcuuuaaggccggacgaaacaugcgcagaaagcuuuucggaguccuccggcuuaaaugccauucgcucuuucucgaucuccaagucaauucgcugcagaccgugugcacgaacaucuacaagauccugcugcuccaagccuaccgguuccacgcuugcgugcuucagcugccguuucaccaacagguguggaagaacccgaccuucuuucugcgggucauuagcgauacugccucccuguguuacucaauccucaaggcaaagaacgccggaaugucgcugggugcgaaaggagccgcgggaccucuuccuagcgaagcggugcaguggcucugccaccaggcuuuccuccugaagcugaccaggcacagagugaccuacgucccgcugcugggcucgcugcgcacugcacagacccagcugucuagaaaacuccccggcaccacccugaccgcucuggaagccgccgccaacccagcauugccgucagauuucaagaccaucuuggac

SEQ ID NO: 92 - RNA, 5829 nt, Artificial Sequence
  Synthetic Construct
auggcuagcaagcugaccauugagagcacucccuucaacguggcugaggggaaggaggugcugcuccuggugcacaaucugccccagcaccuguucggguacuccugguacaagggagaacgcguggacgggaaccggcagaucauaggcuacgucaucggaacccagcaggccacacccgguccagcguacagcggccgggagauuaucuacccgaacgccucccugcugauccaaaacaucauccagaacgacaccgguuucuacacucugcacgugauuaagucagaucuggucaacgaagaggccaccggccaauucaggguguaccccgaacucccuaagccguucaucaccucgaacaacagcaacccggucgaggaugaagaugcgguggccuugacgugcgaaccugagauccagaacaccaccuacuuguggugggugaacaaucagagccugccagucuccccacgacuccagcugucgaacgacaacaggacccugacuuugcuguccgugacucggaacgacgugggcccuuaugaaugcgguauccagaacaagcuguccguggaccacagcgacccugugauccugaacguccuuuacgggccggacgaccccaccauuuccccgucguacacuuacuaccggccgggcgugaaccugucccugucgugccacgcugccuccaauccgccggcccaguacuccuggcucaucgacggaaacauccagcagcacacccaagaacuguucaucuccaacauuaccgagaaaaacucgggacuuuacaccugucaagccaacaauuccgccagcggccacucccgcaccacugucaaaacuaucacuguguccgccgaacucccgaagcccagcaucagcuccaacaacucgaagcccguggaggauaaggacgcugucgcguucaccugugaaccagaggcacagaauaccaccuaccuuuggugggucaacggacagucccugccugucucaccgagacugcagcugucaaacgggaauaggacucugaccuuguuuaacgucacccggaacgacgcccgggccuacgugugcggcauccagaacuccgugagcgcaaaccggucugacccagugacccuggaugugcuguacggccccgacacuccgaucauuucaccccccgauucauccuaccuguccggcgcuaaccucaaccucucaugccacuccgcauccaaccccagcccgcaauauucguggcgcauuaacggaauuccucagcaacauacccagguccuguucauugcgaagaucaccccuaacaacaacggaaccuacgccugcuuugugucaaaccuggccacugguagaaacaacuccaucgugaaguccauuaccgugucggcguccggauccggcgagggcagaggcagccugcugacauguggcgacguggaagagaacccuggccccggagcugccccggagccggagaggacccccguuggccagggaucgugggcccauccgggacgcaccaggggaccauccgacaggggauucuguguggugucaccggccaggccagcagaagaggcaaccagccucgagggagcguugucuggaaccagacauucccacccgucggugggccggcagcaccacgcgggaccaccguccacuuccagaccgccacggccaugggacaccccuugcccgccuguguaugccgagacuaaacacuuccuguacucauccggagacaaggaacagcuucggccguccuuccuccugucgucgcucagaccgagccugaccggagcacgcagauugguggaaacuaucuuccuugggucacguccguggaugccagguaccccacggcgccucccgcgccucccacagagauacuggcagaugcggccucuguuccuggaauugcugggaaaccacgcucagugcccguacggaguccugcucaagacucacugcccucugagggcggcggucacuccggcggccggagugugcgcacgggagaagccccagggaagcguggcagcuccggaagaggaggacaccgauccgcgccgccucgugcaacuucugcgccagcacuccucgcccuggcaagucuacggguucguccgcgccugccugcgccgccuggugccgccugggcucugggguucccggcauaacgagcgccgcuuccugagaaauacuaagaaguuuaucucacuuggaaaacaugccaaguugucgcugcaagaacucacguggaagaugucaguccgcgauugcgccuggcugcgccgcucgccgggcgucggguguguuccagcugcagaacaccgccugagagaagaaauucuggccaaauuucugcauuggcugaugucaguguacguggucgagcugcugcgcuccuuuuucuacgucacugagacuaccuuucaaaagaaccgccuguucuucuaccgcaaaucuguguggagcaagcugcagucaaucggcauucgccagcaucugaagagggugcagcugcgggaacuuuccgaggcagaaguccgccagcaccgggaggcccggccggcgcuucucacgucgcgucugagauucaucccaaagcccgacgggcugaggccuaucgucaacauggauuacgucgugggcgcucgcaccuuucgccgugaaaagcgggccgaacgcuugaccucacgggugaaggcccucuucuccgugcugaacuacgagagagcaagacggccuggccugcugggagcuucggugcugggacuggacgauauccaccgggcuuggcggaccuuuguucuccgggugagagcccaagacccuccgccggaacuguacuucgugaagguggcgaucaccggagccuaugauacuauuccgcaagaucgacucaccgaagucaucgccucgaucaucaaaccgcagaacacuuacugcgucaggcgguacgccgugguccagaaggccgcgcauggccacgugagaaaggcguucaagucgcacguguccacucucaccgaccuccagccuuacaugaggcaauucguugcgcauuugcaagagacuucgccccugagagaugcgguggucaucgagcagagcuccagccugaacgaagcgagcagcggucuguuugacguguuccuccgcuucaugugucaucacgcggugcgaaucaggggaaaaucauacgugcagugccagggaaucccacaaggcagcauucugucgacucucuuguguucccuuugcuacggcgauauggaaaacaagcuguucgcugggaucagacgggacggguugcugcucagacugguggacgacuuccugcuggugacuccgcaccucacucacgccaaaaccuuucuccgcacucuggugaggggagugccagaauacggcuguguggucaaucuccggaaaacuguggugaauuucccugucgaggaugaggcacucggaggaaccgcauuuguccaaaugccagcacauggccuguucccauggugcggucugcugcuggacacccgaacucuugaagugcaguccgacuacuccagcuaugcccggacgagcauccgcgccagccucacuuucaaucgcggcuuuaaggccggacgaaacaugcgcagaaagcuuuucggaguccuccggcuuaaaugccauucgcucuuucucgaucuccaagucaauucgcugcagaccgugugcacgaacaucuacaagauccugcugcuccaagccuaccgguuccacgcuugcgugcuucagcugccguuucaccaacagguguggaagaacccgaccuucuuucugcgggucauuagcgauacugccucccuguguuacucaauccucaaggcaaagaacgccggaaugucgcugggugcgaaaggagccgcgggaccucuuccuagcgaagcggugcaguggcucugccaccaggcuuuccuccugaagcugaccaggcacagagugaccuacgucccgcugcugggcucgcugcgcacugcacagacccagcugucuagaaaacuccccggcaccacccugaccgcucuggaagccgccgccaacccagcauugccgucagauuucaagaccaucuuggacggauccggcacaauccugucugagggcgccaccaacuucagccugcugaaacuggccggcgacguggaacugaacccuggcccuaccccuggaacccagagccccuucuuccuucugcugcugcugaccgugcugacugucgugacaggcucuggccacgccagcucuacaccuggcggcgagaaagagacaagcgccacccagagaagcagcgugccaagcagcaccgagaagaacgccguguccaugaccagcuccgugcugagcagccacucuccuggcagcggcagcagcacaacacagggccaggaugugacacuggccccugccacagaaccugccucuggaucugccgccaccuggggacaggacgugacaagcgugccagugaccagaccugcccugggcucuacaacacccccugcccacgaugugaccagcgccccugauaacaagccugccccuggaagcacagccccuccagcucauggcgugaccucugccccagauaccagaccagccccaggaucuacagccccacccgcacacggcgugacaagugccccugacacaagacccgcuccaggcucuacugcuccuccugcccauggcgugacaagcgcucccgauacaaggccagcuccuggcuccacagcaccaccagcacauggcgugacaucagcucccgacacuagaccugcucccggaucaaccgcuccaccagcucacggcgugaccagcgcaccugauaccagaccugcucugggaagcaccgccccucccgugcacaaugugacaucugcuuccggcagcgccagcggcucugccucuacacuggugcacaacggcaccagcgccagagccacaacaaccccagccagcaagagcacccccuucagcaucccuagccaccacagcgacaccccuaccacacuggccagccacuccaccaagaccgaugccucuagcacccaccacuccagcgugcccccucugaccagcagcaaccacagcacaagcccccagcugucuaccggcgucucauucuucuuucuguccuuccacaucagcaaccugcaguucaacagcagccuggaagaucccagcaccgacuacuaccaggaacugcagcgggauaucagcgagauguuccugcaaaucuacaagcagggcggcuuccugggccugagcaacaucaaguucagacccggcagcgugguggugcagcugacccuggcuuuccgggaaggcaccaucaacgugcacgacguggaaacccaguucaaccaguacaagaccgaggccgccagccgguacaaccugaccaucuccgauguguccguguccgacgugcccuucccauucucugcccagucuggcgcaggcgugccaggauggggaauugcucugcuggugcucgugugcgugcugguggcccuggccaucguguaucugauugcccuggccgugugccagugccggcggaagaauuacggccagcuggacaucuuccccgccagagacaccuaccaccccaugagcgaguaccccacauaccacacccacggcagauacgugccacccagcuccaccgacagaucccccuacgagaaagugucugccggcaacggcggcagcucccugagcuacacaaauccugccguggccgcugccuccgccaaccug

SEQ ID NO: 93 - RNA, 568 nt, Encephalomyocarditis virus
uaacguuacuggccgaagccgcuuggaauaaggccggugugcguuugucuauauguuauuuuccaccauauugccgucuuuuggcaaugugagggcccggaaaccuggcccugucuucuugacgagcauuccuaggggucuuuccccucucgccaaaggaaugcaaggucuguugaaugucgugaaggaagcaguuccucuggaagcuucuugaagacaaacaacgucuguagcgacccuuugcaggcagcggaaccccccaccuggcgacaggugccucugcggccaaaagccacguguauaagauacaccugcaaaggcggcacaaccccagugccacguugugaguuggauaguuguggaaagagucaaauggcucuccucaagcguauucaacaaggggcugaaggaugcccagaagguaccccauuguaugggaucugaucuggggccucggugcacaugcuuuacauguguuuagucgagguuaaaaaacgucuaggccccccgaaccacggggacgugguuuuccuuugaaaaacacgaugauaauauggccacaaccaug
